(19) United States
(12) Patent Application Publication
(10) Pub. No.: US 2012/0213819 A1
(43) Pub. Date: Aug. 23, 2012

(54) HEMAGGLUTININ POLYPEPTIDES, AND REAGENTS AND METHODS RELATING THERETO

(75) Inventors: Kannan Tharakaraman, Arlington, MA (US); Karthik Viswanathan, Waltham, MA (US); Rahul Raman, Waltham, MA (US); Ram Sasisekharan, Cambridge, MA (US)

(73) Assignee: MASSACHUSETTS INSTITUTE OF TECHNOLOGY, Cambridge, MA (US)

(21) Appl. No.: 13/253,060

(22) Filed: Oct. 4, 2011

Related U.S. Application Data
(60) Provisional application No. 61/389,639, filed on Oct. 4, 2010.

(51) Int. Cl. A61K 39/145; A61P 37/04; C07K 7/08; A61P 31/16; C07K 14/11; C07K 4/02

(52) U.S. Cl. 424/210.1; 530/396; 530/322

(57) ABSTRACT

The present invention provides a system for analyzing interactions between glycans and interaction partners that bind to them. The present invention also provides HA polypeptides that bind to umbrella-topology glycans, and reagents and methods relating thereto.

### CROSS-REFERENCE TO RELATED APPLICATIONS

[0001] The present application claims the benefit of U.S. Provisional Application No. 61/389,639 filed Oct. 4, 2010, the complete contents of which is incorporated herein by reference.

### GOVERNMENT SUPPORT

[0002] This invention was made with government support under grant numbers GM57073 and U54 GM62116 awarded by National Institutes of Health. The United States government has certain rights in this invention.

### BACKGROUND

[0003] Influenza has a long history of pandemics, epidemics, resurgences and outbreaks. Avian influenza, including the H5N1 strain, is a highly contagious and potentially fatal pathogen, but it currently has only a limited ability to infect humans. However, avian flu viruses have historically observed to accumulate mutations that alter its host specificity and allow it to readily infect humans. In fact, two of the major flu pandemics of the last century originated from avian flu viruses that changed their genetic makeup to allow for human infection.

[0004] There is a significant concern that the current H5N1, H7N7, H9N2 and H2N2 avian influenza strains might accumulate mutations that alter their host specificity and allow them to readily infect humans. Therefore, there is a need to assess whether the HA protein in these strains can, in fact, convert to a form that can readily infect humans, and a further need to identify HA variants with such ability. There is a further need to understand the characteristics of HA proteins generally that allow or prohibit infection of different subjects, particularly humans. There is also a need for vaccines and therapeutic strategies for effective treatment or delay of onset of disease caused by influenza virus.

### SUMMARY

[0005] The present invention binding agents with particular glycan binding characteristics. In particular, the present invention provides binding agents that bind to sialylated glycans having an umbrella-like topology. In some embodiments, binding agents in accordance with the invention bind to umbrella-topology glycans with high affinity and/or specificity. In some embodiments, binding agents in accordance with the invention show a binding preference for umbrella-topology glycans as compared with cone-topology glycans. In some embodiments, binding agents in accordance with the invention compete with hemagglutinin for binding to glycans on hemagglutinin receptors. In some embodiments, binding agents in accordance with the invention compete with hemagglutinin for binding to umbrella-topology glycans.

[0006] The present invention also provides diagnostic and therapeutic reagents and methods associated with provided binding agents, including vaccines.

[0007] The present invention particularly encompasses the recognition that HA polypeptide variants (e.g., H1, H2, H3, H4, H5, H6, H7, H8, H9, H10, H11, H12, H13, H14, H15, or H16 HA polypeptide variants) with altered glycosylation can show increased (or decreased) binding to human HA receptors as compared with a reference HA polypeptide. In some embodiments, the reference polypeptide is an HA polypeptide of any of the following:

A/South Carolina/1/18 (H1):
(SEQ ID NO: 43)
MEARLLVLLCAFAATNADTICIGYHANNSTDTVDTVLEKNVTVTHSVNLLEDSHNGKLCKLKGI
APLQLGKCNIAGWLLGNPECDLLLTASSWSYIVETSNSENGTCYPGDFIDYEELREQLSSVSSF
EKFEIFPKTSSWPNHETTKGVTAACSYAGASSFYRNLLWLTKKGSSYPKLSKSYVNNKGKEVLV
LWGVHHPPTGTDQQSLYQNADAYVSVGSSKYNRRFTPEIAARPKVRDQAGRMNYYWTLLEPGDT
ITFEATGNLIAPWYAFALNRGSGSGIITSDAPVHDCNTKCQTPHGAINSSLPFQNIHPVTIGEC
PKYVRSTKLRMATGLRNIPSIQSRGLFGAIAGFIEGGWTGMIDGWYGYHHQNEQGSGYAADQKS
TQNAIDGITNKVNSVIEKMNTQFTAVGKEFNNLERRIENLNKKVDDGFLDIWTYNAELLVLLEN
ERTLDFHDSNVRNLYEKVKSQLKNNAKEIGNGCFEFYHKCDDACMESVRNGTYDYPKYSEESKL
NREEIDGVKLESMGVYQILAIYSTVASSLVLLVSLGAISFWMCSNGSLQCRICI
A/Brisbane/59/07 (H1):
(SEQ ID NO: 44)
MKVKLLVLLCTFTATYADTICIGYHANNSTDTVDTVLEKNVTVTHSVNLLENSHNGKLCLLKGI
APLQLGNCSVAGWILGNPECELLISKESWSYIVEKPNPENGTCYPGHFADYEELREQLSSVSSF
ERFEIFPKESSWPNHTVTGVSASCSHNGESSFYRNLLWLTGKNGLYPNLSKSYANNKEKEVLVL
WGVHHPPNIGDQKALYHTENAYVSVVSSHYSRKFTPEIAKRPKVRDQEGRINYYWTLLEPGDTI
IFEANGNLIAPRYAFALSRGFGSGIINSNAPMDKCDAKCQTPQGAINSSLPFQNVHPVTIGECP
KYVRSAKLRMVTGLRNIPSIQSRGLFGAIAGFIEGGWTGMVDGWYGYHHQNEQGSGYAADQKST
QNAINGITNKVNSVIEKMNTQFTAVGKEFNKLERRMENLNKKVDDGFIDIWTYNAELLVLLENE
RTLDFHDSNVKNLYEKVKSQLKNNAKEIGNGCFEFYHKCNDECMESVKNGTYDYPKYSEESKLN
REKIDGVKLESMGVYQILAIYSTVASSLVLLVSLGAISFWMCSNGSLQCRICI
A/California/04/09 (H1):
(SEQ ID NO: 45)
MKAILVVLLYTFATANADTLCIGYHANNSTDTVDTVLEKNVTVTHSVNLLEDKHNGKLCK
LRGVAPLHLGKCNIAGWILGNPECESLSTASSWSYIVETPSSDNGTCYPGDFIDYEELRE
QLSSVSSFERFEIFPKTSSWPNHDSNKGVTAACPHAGAKSFYKNLIWLVKKGNSYPKLSK
SYINDKGKEVLVLWGIHHPSTSADQQSLYQNADTYVFVGSSRYSKKFKPEIAIRPKVRDQ
EGRMNYYWTLVEPGDKITFEATGNLVVPRYAFAMERNAGSGIIISDTPVHDCNTTCQTPK
GAINTSLPFQNIHPITIGKCPKYVKSTKLRLATGLRNIPSIQSRGLFGAIAGFIEGGWTG
MVDGWYGYHHQNEQGSGYAADLKSTQNAIDEITNKVNSVIEKMNTQFTAVGKEFNHLEKR
IENLNKKVDDGFLDIWTYNAELLVLLENERTLDYHDSNVKNLYEKVRSQLKNNAKEIGNG
CFEFYHKCDNTCMESVKNGTYDYPKYSEEAKLNREEIDGVKLESTRIYQILAIYSTVASS
LVLVVSLGAISFWMCSNGSLQCRICI
A/Albany/6/58 (H2):
(SEQ ID NO: 46)
MAIIYLILLFTAVRGDQICIGYHANNSTEKVDTILERNVTVTHAKDILEKTHNGKLCKLNGIPP
LELGDCSIAGWLLGNPECDRLLSVPEWSYIMEKENPRDGLCYPGSFNDYEELKHLLSSVKHFEK
VKILPKDRWTQHTTTGGSRACAVSGNPSFFRNMVWLTKKGSNYPVAKGSYNNTSGEQMLIIWGV
HHPNDETEQRTLYQNVGTYVSVGTSTLNKRSTPDIATRPKVNGLGSRMEFSWTLLDMWDTINFE
STGNLIAPEYGFKISKRGSSGIMKTEGTLGNCETKCQTPLGAINTTLPFHNVHPLTIGECPKYV
KSEKLVLATGLRNVPQIESRGLFGAIAGFIEGGWQGMVDGWYGYHHSNDQGSGYAADKESTQKA
FDGITNRVNSVIEKMNTQFEAVGKEFSNLERRLENLNKKMEDGFLDVWTYNAELLVLMENERTL
DFHDSNVKNLYDKVKMQLRDNVKELGNGCFEFYPKCDDECMNSVKNGTYDYPKYEEESKLNRNE
IKGVKLSSMGVYQILAIYATVAGSLSLAIMMAGISFWMCSNGSLQCRICI
A/Aichi/1/68 (H3):
(SEQ ID NO: 47)
MKTIIALSYIFCLALGQDLPGNDNSTATLCLGHHAVPNGTLVKTITDDQIEVTNATELVQSSST
GKICNNPHRILDGIDCTLIDALLGDPHCDVFQNETWDLFVERSKAFSNCYPYDVPDYASLRSLV
ASSGTLEFITEGFTWTGVTQNGGSNACKRGPGSGFFSRLNWLTKSGSTYPVLNVTMPNNDNFDK
LYIWGIHHPSTNQEQTSLYVQASGRVTVSTRRSQQTIIPNIGSRPWVRGLSSRISIYWTIVKPG
DVLVINSNGNLIAPRGYFKMRTGKSSIMRSDAPIDTCISECITPNGSIPNDKPFQNVNKITYGA
CPKYVKQNTLKLATGMRNVPEKQTRGLFGAIAGFIENGWEGMIDGWYGFRHQNSEGTGQAADLK
STQAAIDQINGKLNRVIEKTNEKFHQIEKEFSEVEGRIQDLEKYVEDTKIDLWSYNAELLVALE
NQHTIDLTDSEMNKLFEKTRRQLRENAEEMGNGCFKIYHKCDNACIESIRNGTYDHDVYRDEAL
NNRFQIKGVELKSGYKDWILWISFAISCFLLCVVLLGFIMWACQRGNIRCNICI
A/Moscow/10/99 (H3):
(SEQ ID NO: 48)
MKTIIALSYILCLVFAQKLPGNDNSTATLCLGHHAVPNGTLVKTITNDQIEVTNATELV
QSSSTGRICDSPHQILDGENCTLIDALLGDPHCDGFQNKEWDLFVERSKAYSNCYPYDV
PDYASLRSLVASSGTLEFNNESFNWTGVAQNGTSSSCKRRSIKSFFSRLNWLHQLKYRY
PALNVTMPNNDKFDKLYIWGVHHPSTDSDQTSLYTQASGRVTVSTKRSQQTVIPNIGSR
PWVRGISSRISIYWTIVKPGDILLINSTGNLIAPRGYFKIRSGKSSIMRSDAPIGKCNS
ECITPNGSIPNDKPFQNVNRITYGACPRYVKQNTLKLATGMRNVPEKQTRGIFGAIAGF
IENGWEGMMDGWYGFRHQNSEGTGQAADLKSTQAAINQINGKLNRLIEKTNEKFHQIEK
EFSEVEGRIQDLEKYVEDTKIDLWSYNAELLVALENQHTIDLTDSEMNKLFERTRKQLR
ENAEDMGNGCFKIYHKCDNACIGSIRNGTYDHDVYRDEALNNRFQIKGVELKSGYKDWI
LWISFAISCFLLCVVLLGFIMWACQKGNIRCNICI
A/Perth/16/09 (H3):
(SEQ ID NO: 49)
MKTIIALSYILCLVFAQKLPGNDNSTATLCLGHHAVPNGTIVKTITNDQIEVTNATELVQSSST
GEICDSPHQILDGKNCTLIDALLGDPQCDGFQNKKWDLFVERSKAYSNCYPYDVPDYASLRSLV
ASSGTLEFNNESFNWTGVTQNGTSSACIRRSKNSFFSRLNWLTHLNFKYPALNVTMPNNEQFDK
LYIWGVHHPGTDKDQIFLYAQASGRITVSTKRSQQTVSPNIGSRPRVRNIPSRISIYWTIVKPG
DILLINSTGNLIAPRGYFKIRSGKSSIMRSDAPIGKCNSECITPNGSIPNDKPFQNVNRITYGA
CPRYVKQNTLKLATGMRNVPEKQTRGIFGAIAGFIENGWEGMVDGWYGFRHQNSEGRGQAADLK
STQAAIDQINGKLNRLIGKTNEKFHQIEKEFSEVEGRIQDLEKYVEDTKIDLWSYNAELLVALE
NQHTIDLTDSEMNKLFEKTKKQLRENAEDMGNGCFKIYHKCDNACIGSIRNGTYDHDVYRDEAL
NNRFQIKGVELKSGYKDWILWISFAISCFLLCVALLGFIMWACQKGNIRCNICI
A/Vietnam/1203/04 (H5):
(SEQ ID NO: 50)
MEKIVLLFAIVSLVKSDQICIGYHANNSTEQVDTIMEKNVTVTHAQDILEKKHNGKLCDLDGVK
PLILRDCSVAGWLLGNPMCDEFINVPEWSYIVEKANPVNDLCYPGDFNDYEELKHLLSRINHFE
KIQIIPKSSWSSHEASLGVSSACPYQGKSSFFRNVVWLIKKNSTYPTIKRSYNNTNQEDLLVLW
GIHHPNDAAEQTKLYQNPTTYISVGTSTLNQRLVPRIATRSKVNGQSGRMEFFWTILKPNDAIN
FESNGNFIAPEYAYKIVKKGDSTIMKSELEYGNCNTKCQTPMGAINSSMPFHNIHPLTIGECPK
YVKSNRLVLATGLRNSPQRERRRKKRGLFGAIAGFIEGGWQGMVDGWYGYHHSNEQGSGYAADK
ESTQKAIDGVTNKVNSIIDKMNTQFEAVGREFNNLERRIENLNKKMEDGFLDVWTYNAELLVLM
ENERTLDFHDSNVKNLYDKVRLQLRDNAKELGNGCFEFYHKCDNECMESVRNGTYDYPQYSEEA
RLKREEISGVKLESIGIYQILSIYSTVASSLALAIMVAGLSLWMCSNGSLQCRICI
A/Egypt/2786-NAMRU3/06 (H5):
(SEQ ID NO: 51)
MEKIVLLLAIVSLVKSDQICIGYHANNSTEQVDTIMEKNVTVTHAQDILEKTHNGKLCDLDGVK
PLILRDCSVAGWLLGNPMCDEFLNVPEWSYIVEKINPANDLCYPGNFNDYEELKHLLSRINHFE
KIQIIPKSSWSDHEASSGVSSACPYQGRSSFFRNVVWLIKKDNAYPTIKRSYNNTNQEDLLVLW
GIHHPNDAAEQTRLYQNPTTYISVGTSTLNQRLVPKIATRSKVNGQSGRMEFFWTILKSNDAIN
FESNGNFIAPENAYKIVKKGDSTIMKSELEYGNCNTKCQTPIGAINSSMPFHNIHPLTIGECPK
YVKSNRLVLATGLRNSPQGERRRKKRGLFGAIAGFIEGGWQGMVDGWYGYHHSNEQGSGYAADK
ESTQKAIDGVTNKVNSIIDKMNTQFEAVGREFNNLERRIENLNKKMEDGFLDVWTYNAELLVLM
ENERTLDFHDSNVKNLYDKVRLQLRDNAKELGNGCFEFYHRCDNECMESVRNGTYDYPQYSEEA
RLKREEISGVKLESIGTYQILSIYSTVASSLALAIMVAGLFLWMCSNGSLQCRICI
A/New York/107/03 (H7):
(SEQ ID NO: 52)
MNTQILAFIACVLTGVKGDKICLGHHAVANGTKVNTLTERGIEVVNATETVETTNIKKICTQGK
RPTDLGQCGLLGTLIGPPQCDQFLEFSSDLIIERREGTDICYPGRFTNEESLRQILRRSGGIGK
ESMGFTYSGIRTNGATSACTRSGSSFYAEMKWLLSNSDNAAFPQMTKAYRNPRNKPALIIWGVH
HSESVSEQTKLYGSGNKLITVRSSKYQQSFTPNPGARRIDFHWLLLDPNDTVTFTFNGAFIAPD
RTSFFRGESLGVQSDAPLDSSCRGDCFHSGGTIVSSLPFQNINSRTVGKCPRYVKQKSLLLATG
MRNVPEKPKPRGLFGAIAGFIENGWEGLINGWYGFRHQNAQGEGTAADYKSTQSAIDQITGKLN
RLIGKTNQQFELIDNEFNEIEQQIGNVINWTRDAMTEIWSYNAELLVAMENQHTIDLADSEMSK
LYERVKKQLRENAEEDGTGCFEIFHKCDDQCMESIRNNTYDHTQYRTESLQNRIQIDPVKLSSG
YKDIILWFSFGASCFLLLAIAMGLVFICIKNGNMQCTICI

[0008] The present invention also particularly encompasses the recognition that HA polypeptide variants (e.g., H1, H2, H3, H4, H5, H6, H7, H8, H9, H10, H11, H12, H13, H14, H15, or H16 HA polypeptide variants) with alterations in the HA loop region, can show increased (or decreased) binding to human HA receptors as compared with a reference HA polypeptide (including, for example, an HA polypeptide of any of SEQ ID NOs: 43-52).

[0009] In some embodiments, the present invention encompasses the recognition that H5 HA polypeptide variants with altered glycosylation can show increased (or decreased) binding to human HA receptors as compared with a reference HA polypeptide. In some embodiments, the reference polypeptide is an HA polypeptide of any of the following:

A/Hongkong/486/97
(SEQ ID NO: 53)
MEKIVLLLATVSLVKSDQICIGYHANNSTEQVDTIMEKNVTVTHAQDILERTHNGKLCDLNGVK
PLILRDCSVAGWLLGNPMCDEFINVPEWSYIVEKASPANDLCYPGNFNDYEELKHLLSRINHFE
KIQIIPKSSWSNHDASSGVSSACPYLGRSSFFRNVVWLIKKNSAYPTIKRSYNNTNQEDLLVLW
GIHHPNDAAEQTKLYQNPTTYISVGTSTLNQRLVPEIATRPKVNGQSGRMEFFWTILKPNDAIN
FESNGNFIAPEYAYKIVKKGDSTIMKSELEYGNCNTKCQTPMGAINSSMPFHNIHPLTIGECPK
YVKSNRLVLATGLRNTPQRERRRKKRGLFGAIAGFIEGGWQGMVDGWYGYHHSNEQGSGYAADK
ESTQKAIDGVTNKVNSIINKMNTQFEAVGREFNNLERRIENLNKKMEDGFLDVWTYNAELLVLM
ENERTLDFHDSNVKNLYDKVRLQLRDNAKELGNGCFEFYHKCDNECMESVKNGTYDYPQYSEEA
RLNREEISGVKLESMGTYQILSIYSTVASSLALAIMVAGLSLWMCSNGSLQCRICI
A/Hongkong/213/03
(SEQ ID NO: 54)
MEKIVLLFAIVSLVKSDQICIGYHANNSTEQVDTIMEKNVTVTHAQDILEKTHNGKLCDLDGVK
PLILRDCSVAGWLLGNPMCDEFINVPEWSYIVEKANPANDLCYPGDFNDYEELKHLLSRINHFE
KIQIIPKNSWSSHEASLGVSSACPYQGKSSFFRNVVWLIKKNNAYPTIKRSYNNTNQEDLLVLW
GIHHPNDAAEQTRLYQNPTTYISVGTSTLNQRLVPKIATRSKVNGQNGRMEFFWTILKPNDAIN
FESNGNFIAPEYAYKIVKKGDSAIMKSELEYGNCNTKCQTPMGAINSSMPFHNIHPLTIGECPK
YVKSNRLVLATGLRNSPQRERRRKKRGLFGAIAGFIEGGWQGMVDGWYGYHHSNEQGSGYAADK
ESTQKAIDGVTNKVNSIIDKMNTQFEAVGREFNNLERRIENLNKKMEDGFLDVWTYNAELLVLM
ENERTLDFHDSNVKNLYDKVRLQLRDNAKELGNGCFEFYHKCDNECMESVRNGTYDYPQYSEEA
RLKREEISGVKLESIGTYQILSIYSTVASSLALAIMVAGLSLWMCSNGSLQCRICI
A/Vietnam/1203/04
(SEQ ID NO: 205)
MEKIVLLFAIVSLVKSDQICIGYHANNSTEQVDTIMEKNVTVTHAQDILEKKHNGKLCDLDGVK
PLILRDCSVAGWLLGNPMCDEFINVPEWSYIVEKANPVNDLCYPGDFNDYEELKHLLSRINHFE
KIQIIPKSSWSSHEASLGVSSACPYQGKSSFFRNVVWLIKKNSTYPTIKRSYNNTNQEDLLVLW
GIHHPNDAAEQTKLYQNPTTYISVGTSTLNQRLVPRIATRSKVNGQSGRMEFFWTILKPNDAIN
FESNGNFIAPEYAYKIVKKGDSTIMKSELEYGNCNTKCQTPMGAINSSMPFHNIHPLTIGECPK
YVKSNRLVLATGLRNSPQRERRRKKRGLFGAIAGFIEGGWQGMVDGWYGYHHSNEQGSGYAADK
ESTQKAIDGVTNKVNSIIDKMNTQFEAVGREFNNLERRIENLNKKMEDGFLDVWTYNAELLVLM
ENERTLDFHDSNVKNLYDKVRLQLRDNAKELGNGCFEFYHKCDNECMESVRNGTYDYPQYSEEA
RLKREEISGVKLESIGIYQILSIYSTVASSLALAIMVAGLSLWMCSNGSLQCRICI
A/Indonesia/5/05
(SEQ ID NO: 55)
MEKIVLLLAIVSLVKSDQICIGYHANNSTEQVDTIMEKNVTVTHAQDILEKTHNGKLCDLDGVK
PLILRDCSVAGWLLGNPMCDEFINVPEWSYIVEKANPTNDLCYPGSFNDYEELKHLLSRINHFE
KIQIIPKSSWSDHEASSGVSSACPYLGSPSFFRNVVWLIKKNSTYPTIKKSYNNTNQEDLLVLW
GIHHPNDAAEQTMLYQNPTTYISIGTSTLNQRLVPKIATRSKVNGQSGRMEFFWTILKPNDAIN
FESNGNFIAPEYAYKIVKKGDSAIMKSELEYGNCNTKCQTPMGAINSSMPFHNIHPLTIGECPK
YVKSNRLVLATGLRNSPQRESRRKKRGLFGAIAGFIEGGWQGMVDGWYGYHHSNEQGSGYAADK
ESTQKAIDGVTNKVNSIIDKMNTQFEAVGREFNNLERRIENLNKKMEDGFLDVWTYNAELLVLM
ENERTLDFHDSNVKNLYDKVRLQLRDNAKELGNGCFEFYHKCDNECMESIRNGTYNYPQYSEEA
RLKREEISGVKLESIGTYQILSIYSTVASSLALAIMMAGLSLWMCSNGSLQCRICI
A/Egypt/2786-NAMRU3/06
(SEQ ID NO: 206)
MEKIVLLLAIVSLVKSDQICIGYHANNSTEQVDTIMEKNVTVTHAQDILEKTHNGKLCDLDGVK
PLILRDCSVAGWLLGNPMCDEFLNVPEWSYIVEKINPANDLCYPGNFNDYEELKHLLSRINHFE
KIQIIPKSSWSDHEASSGVSSACPYQGRSSFFRNVVWLIKKDNAYPTIKRSYNNTNQEDLLVLW
GIHHPNDAAEQTRLYQNPTTYISVGTSTLNQRLVPKIATRSKVNGQSGRMEFFWTILKSNDAIN
FESNGNFIAPENAYKIVKKGDSTIMKSELEYGNCNTKCQTPIGAINSSMPFHNIHPLTIGECPK
YVKSNRLVLATGLRNSPQGERRRKKRGLFGAIAGFIEGGWQGMVDGWYGYHHSNEQGSGYAADK
ESTQKAIDGVTNKVNSIIDKMNTQFEAVGREFNNLERRIENLNKKMEDGFLDVWTYNAELLVLM
ENERTLDFHDSNVKNLYDKVRLQLRDNAKELGNGCFEFYHRCDNECMESVRNGTYDYPQYSEEA

RLKREEISGVKLESIGTYQILSIYSTVASSLALAIMVAGLFLWMCSNGSLQCRICI

[0010] The present invention also particularly encompasses the recognition that H5 HA polypeptide variants with alterations in the HA loop region, can show increased (or decreased) binding to human HA receptors as compared with a reference HA polypeptide (including, for example, an HA polypeptide of any of SEQ ID NO: 50, 51, and 53-55, 205 and 206).

### BRIEF DESCRIPTION OF THE DRAWINGS

[0011] FIG. 1A-1C. Alignment of exemplary sequences of wild type HA. Sequences were obtained from the NCBI influenza virus sequence database (www.ncbi.nlm.nih.gov/genomes/FLU/FLU.html). H1_Av (SEQ ID NO: 1). H1_Hu1 (SEQ ID NO: 2). H1_Hu2 (SEQ ID NO: 3). H2_Av (SEQ ID NO: 4). H2_Hu (SEQ ID NO: 5). H3_Av (SEQ ID NO: 6). H3_Hu1 (SEQ ID NO: 7). H3_Hu2 (SEQ ID NO: 8). H4_Av (SEQ ID NO: 9). H5_Av1 (SEQ ID NO: 10). H5_Av2 (SEQ ID NO: 11). H6_Av (SEQ ID NO: 12). H7_Av (SEQ ID NO: 13). H8_Av (SEQ ID NO: 14). H9_Av (SEQ ID NO: 15). H10_Av (SEQ ID NO: 16). H11_Av (SEQ ID NO: 17). H12_Av (SEQ ID NO: 18). H13_Av (SEQ ID NO: 19). H14_Av (SEQ ID NO: 20). H15_Av (SEQ ID NO: 21). H16_Av (SEQ ID NO: 22).

[0012] FIG. 2A-B. Sequence alignment of HA glycan binding domain. Gray: conserved amino acids involved in binding to sialic acid. Red: particular amino acids involved in binding to Neu5Acα2-3/6Gal motifs. Yellow: amino acids that influence positioning of Q226 (137, 138) and E190 (186, 228). Green: amino acids involved in binding to other monosaccharides (or modifications) attached to Neu5Acα2-3/6Gal motif. The sequence for ASI30, APR34, ADU63, ADS97 and Viet04 were obtained from their respective crystal structures. The other sequences were obtained from SwissProt (us.expasy.org). Abbreviations: ADA76, A/duck/Alberta/35/76 (H1N1) (SEQ ID NO: 23); ASI30, A/Swine/Iowa/30 (H1N1) (SEQ ID NO: 24); APR34, A/Puerto Rico/8/34 (H1N1) (SEQ ID NO: 25); ASC18, A/South Carolina/1/18 (H1N1) (SEQ ID NO: 26); AT91, A/Texas/36/91 (H1N1) (SEQ ID NO: 27); ANY18, A/New York/1/18 (H1N1) (SEQ ID NO: 28); ADU63, A/Duck/Ukraine/1/63 (H3N8) (SEQ ID NO: 29); AAI68, A/Aichi/2/68 (H3N2) (SEQ ID NO: 30); AM99, A/Moscow/10/99 (H3N2) (SEQ ID NO: 31); ADS97, A/Duck/Singapore/3/97 (H5N3) (SEQ ID NO: 32); Viet04, A/Vietnam/1203/2004 (H5N1) (SEQ ID NO: 33).

[0013] FIG. 3. Sequence alignment illustrating conserved subsequences characteristic of H1 HA. FIG. 3A presents the same alignment that was presented in FIG. 1A, except that FIG. 3A indicates the presence of an additional conserved subsequence. FIG. 3B presents the same alignment that was presented in FIG. 1C, except that FIG. 3A indicates the presence of an additional conserved subsequence.

[0014] FIG. 4. Sequence alignment illustrating conserved subsequences characteristic of H3 HA. FIG. 4A presents the same alignment that was presented in FIG. 1A, except that FIG. 4A indicates the presence of an additional conserved subsequence. FIG. 4B presents the same alignment that was presented in FIG. 1C, except that FIG. 4A indicates the presence of an additional conserved subsequence.

[0015] FIG. 5A-1. Sequence alignment illustrating conserved subsequences characteristic of H5 HA. FIG. 5A-1 presents the same alignment that was presented in FIG. 1A, except that FIG. 5A-1 indicates the presence of an additional conserved subsequence.

[0016] FIG. 5A-2 presents the same alignment that was presented in FIG. 1C, except that FIG. 5A-2 indicates the presence of an additional conserved subsequence.

[0017] FIG. 5B1-B5 presents additional H5 HA sequence alignments. Consensus (SEQ ID NO: 34); AAL59142 (SEQ ID NO: 35); AAZ29963 (SEQ ID NO: 36); ABA70758 (SEQ ID NO: 37); ABB87042 (SEQ ID NO: 38); ABD14810 (SEQ ID NO: 39); ABD46740 (SEQ ID NO: 40); ABD85144 (SEQ ID NO: 41); and ABE97569 (SEQ ID NO: 42).

[0018] FIG. 5B-6 shows additional avian 4 (HA) H5N1 viral strains.

[0019] FIG. 6. Framework for understanding glycan receptor specificity. α2-3- and/or α2-6-linked glycans can adopt different topologies. According to the present invention, the ability of an HA polypeptide to bind to certain of these topologies confers upon it the ability to mediate infection of different hosts, for example, humans. As illustrated in Panel A of this figure, the present invention defines two particularly relevant topologies, a “cone” topology and an “umbrella” topology. The cone topology can be adopted by α2-3- and/or α2-6-linked glycans, and is typical of short oligosaccharides or branched oligosaccharides attached to a core (although this topology can be adopted by certain long oligosaccharides). The umbrella topology can only be adopted by α2-6-linked glycans (presumably due to the increased conformational plurality afforded by the extra C5-C6 bond that is present in the α2-6 linkage), and is predominantly adopted by long oligosaccharides or branched glycans with long oligosaccharide branches, particularly containing the motif Neu5Acα2-6Galβ1-3/4GlcNAc-. As described herein, ability of HA polypeptides to bind the umbrella glycan topology, confers binding to human receptors and/or ability to mediate infection of humans. Panel B of this Figure specifically shows the topology of α2-3 and α2-6 as governed by the glycosidic torsion angles of the trisaccharide motifs—Neu5Acα2-3Galβ1-3/4GlcNAc and Neu5Acα2-6Galβ1-4GlcNAc respectively. A parameter (θ)—angle between C2 atom of Neu5Ac and C1 atoms of the subsequent Gal and GlcNAc sugars in these trisaccharide motifs was defined to characterize the topology. Superimposition of the θ contour and the conformational maps of the α2-3 and α2-6 motifs shows that α2-3 motifs adopt 100% cone-like topology and α2-6 motifs sampled both cone-like and umbrella-like topologies (Panel C). In the cone-like topology sampled by α2-3 and α2-6, GlcNAc and subsequent sugars are positioned along a region spanning a cone. Interactions of HA with cone-like topology primarily involve contacts of amino acids at the numbered positions (based on H3 HA numbering) with Neu5Ac and Gal sugars. On the other hand, in umbrella-like topology, which is unique to α2-6, \ GlcNAc and subsequent sugars bend towards the HA binding site (as observed in HA-α2-6 co-crystal structures). Longer α2-6 oligosaccharides (e.g. at least a tetrasaccharide) would favor this conformation since it is stabilized by intra-sugar van der Waals contact between acetyl groups of GlcNAc and Neu5Ac. HA interactions with umbrella-like topology involve contacts of amino acids at the numbered positions (based on H3 HA numbering) with GlcNAc and subsequent sugars in addition to contacts with Neu5Ac and Gal sugars. Panel C of this Figure depicts conformational sampling of cone- and umbrella-like topology by α2-3 and α2-6. Sections (A)-(D) show the conformational (φ, ψ) maps of Neu5Acα2-3Gal, Neu5Acα2-6Gal, Galβ1-3GlcNAc, and Galβ1-4GlcNAc linkages, respectively. These maps obtained from GlycoMaps DB (www.glycosciences.de/modeling/glycomapsdb/) were generated using ab initio MD simulations using MM3 force field. Energy distribution is color coded starting from dark (representing highest energy) to light representing lowest energy. Encircled regions 1-5 represent (φ, ψ) values observed for the α2-3 and α2-6 oligosaccharides in the HA-glycan co-crystal structures. The trans conformation (encircled region 1) of Neu5Acα2-3Gal predominates in HA binding pocket with the exception of the co-crystal structure of A/Aichi/2/68 H3N2 HA with α2-3 where this conformation is gauche (encircled region 2). On the other hand, the cis conformation of Neu5Acα2-6Gal (encircled region 3) predominates in HA binding pocket. The cone-like topology is sampled by encircled regions 1 and 2 and the umbrella-like topology is sampled by encircled region 3. Sections (E)-(F) show sampling of cone-like and umbrella-like topologies by α2-3 and α2-6 motifs, respectively. The darker regions in the conformational maps were used as the outer boundaries to calculate the θ parameter (angle between C2 atom of Neu5Ac and C1 atoms of subsequent Gal and GlcNAc sugars) for a given set of (φ, ψ) values. Based on the energy cutoff, the value of θ>110° was used to characterize cone-like topology and θ<100° was used to characterize umbrella-like topology. Superimposition of the θ contour with the conformational energy map indicated that α2-3 motif adopts 100% cone-like topology since it was energetically unfavorable to adopt umbrella-like topology. On the other hand, the α2-6 motif sampled both the cone-like and umbrella-like topologies and this sampling was classified based on the ω angle (O—C6-C5-H5) of Neu5Acα2-6Gal linkage.

[0020] FIG. 7. Interactions of HA residues with cone vs. umbrella glycan topologies. Analysis of HA-glycan co-crystals reveals that the position of Neu5Ac relative to the HA binding site is almost invariant. Contacts with Neu5Ac involve highly conserved residues such as F98, S/T136, W153, H183 and L/1194. Contacts with other sugars involve different residues, depending on whether the sugar linkage is α2-3 or α2-6 and whether the glycan topology is cone or umbrella. For example, in the cone topology, the primary contacts are with Neu5Ac and with Gal sugars. E190 and Q226 play particularly important roles in this binding. This Figure also illustrates other positions (e.g., 137, 145, 186, 187, 193, 222) that can participate in binding to cone structures. In some cases, different residues can make different contacts with different glycan structures. The type of amino acid in these positions can influence ability of an HA polypeptide to bind to receptors with different modification and/or branching patterns in the glycan structures. In the umbrella topology, contacts are made with sugars beyond Neu5Ac and Gal. This Figure illustrates residues (e.g., 137, 145, 156, 159, 186, 187, 189, 190, 192, 193, 196, 222, 225, 226) that can participate in binding to umbrella structures. In some cases, different residues can make different contacts with different glycan structures. The type of amino acid in these positions can influence ability of an HA polypeptide to bind to receptors with different modification and/or branching patterns in the glycan structures. In some embodiments, a D residue at position 190 and/or a D residue at position 225 contribute(s) to binding to umbrella topologies.

[0021] FIG. 8. Exemplary cone topologies. This Figure illustrates certain exemplary (but not exhaustive) glycan structures that adopt cone topologies.

[0022] FIG. 9. Exemplary umbrella topologies. (A) Certain exemplary (but not exhaustive) N- and O-linked glycan structures that can adopt umbrella topologies. (B) Certain exemplary (but not exhaustive) O-linked glycan structures that can adopt umbrella topologies.

[0023] FIG. 10A-B. Glycan profile of human bronchial epithelial cells and human colonic epithelial cells. To further investigate the glycan diversity in the upper respiratory tissues, N-linked glycans were isolated from HBEs (a representative upper respiratory cell line) and analyzed using MALDI-MS. The predominant expression of α2-6 in HBEs was confirmed by pre-treating the sample with Sialidase S (α2-3 specific) and Sialidase A (cleaves and SA). The predominant expression of glycans with long branch topology is supported by TOF-TOF fragmentation analysis of representative mass peaks. To provide a reference for glycan diversity in the upper respiratory tissues, the N-linked glycan profile of human colonic epithelial cells (HT29; a representative gut cell line) was obtained. This cell line was chosen because the current H5N1 viruses have been shown to infect gut cells. Sialidase A and S pre-treatment controls showed predominant expression of α2-3 glycans in the HT-29 cells. Moreover, the long branch glycan topology is not as prevalent as observed for HBEs. Therefore, human adaptation of the H5N1 HA would involve HA mutations that would enable high affinity binding to the diverse glycans expressed in the human upper respiratory tissues (e.g., umbrella glycans).

[0024] FIG. 11. Conformational map and solvent accessibility of Neu5Acα2-3Gal and Neu5Acα2-6Gal motifs. Panel A shows the conformational map of Neu5Acα2-3Gal linkage. The encircled region 2 is the trans conformation observed in the APR34_H1_{—}23, ADU63_H3_{—}23 and ADS97_H5_{—}23 co-crystal structures. The encircled region 1 is the conformation observed in the AAI68_H3_{—}23 co-crystal structure. Panel B shows the conformational map of Neu5Acα2-6Gal where the cis-conformation (encircled region 3) is observed in all the HA-α2-6 sialylated glycan co-crystal structures. Panel C shows difference between solvent accessible surface area (SASA) of Neu5Ac α2-3 and α2-6 sialylated oligosaccharides in the respective HA-glycan co-crystal structures. The red and cyan bars respectively indicate that Neu5Ac in α2-6 (positive value) or α2-3 (negative value) sialylated glycans makes more contact with glycan binding site. Panel D shows difference between SASA of NeuAc in α2-3 sialylated glycans bound to swine and human H1 (H1_{α2-3}), avian and human H3 (H3_{α2-3}), and of NeuAc in α2-6 sialylated glycans bound to swine and human H1 (H1_{α2-6}). The negative bar for H3_{α2-3} indicates lesser contact of the human H3 HA with Neu5Acα2-3Gal compared to that of avian H3. Torsion angles—φ: C2-C1-O—C3 (for Neu5Acα2-3/6 linkage); ψ: C1-O—C3-H3 (for Neu5Acα2-3Gal) or C1-O—C6-C5 (for Neu5Acα2-6Gal); ω: O—C6-C5-H5 (for Neu5Acα2-6Gal) linkages. The φ, ψ maps were obtained from GlycoMaps DB (www.glycosciences.de/modeling/glycomapsdb/) which was developed by Dr. Martin Frank and Dr. Claus-Wilhelm von der Lieth (German Cancer Research Institute, Heidelberg, Germany). The coloring scheme from high energy to low energy is from bright red to bright green, respectively.

[0025] FIG. 12A-B. Lectin staining of upper respiratory tissue sections. A co-stain of the tracheal tissue with Jacalin (lighter) and ConA (darker) reveals a preferential binding of Jacalin (binds specifically to O-linked glycans) to goblet cells on the apical surface of the trachea and ConA (binds specifically to N-linked glycans) to the ciliated tracheal epithelial cells. Without wishing to be bound by any particular theory, we note that this finding suggests that goblet cells predominantly express O-linked glycans while ciliated epithelial cells predominantly express N-linked glycans. Co-staining of trachea with Jacalin and SNA (dark; binds specifically to α2-6) shows binding of SNA to both goblet and ciliated cells. On the other hand, co-staining of Jacalin (lighter) and MAL (darker), which specifically binds to α2-3 sialylated glycans, shows weak minimal to no binding of MAL to the pseudostratified tracheal epithelium but extensive binding to the underlying regions of the tissue. Together, the lectin staining data indicated predominant expression and extensive distribution of α2-6 sialylated glycans as a part of both N-linked and O-linked glycans respectively in ciliated and goblet cells on the apical side of the tracheal epithelium.

[0026] FIG. 13: Comparison of RBS of H5N1 HAs across different genetic clades. A/Hong Kong/486/97, Genetic Clade 0 (HK_{—}486_{—}97_c0) (SEQ ID NO: 76); A/Duck/Hunan/795/02, Genetic Clade 2.1.1 (DK_Hunan_{—}795_{—}02_c.2.1.1) (SEQ ID NO: 77); A/Hong Kong/213/03, Genetic Clade 1 (Hk_{—}213_{—}03_c1) (SEQ ID NO: 78); A/Vietnam/1194/04, Genetic Clade 1 (Viet_{—}1194_{—}04_c1) (SEQ ID NO: 79); A/Vietnam/1203/04, Genetic Clade 1 (Viet_{—}1203_{—}04_c1) (SEQ ID NO: 80); A/Indonesia/5/05, Genetic Clade 2.1.3 (Ind_{—}5_{—}05_c2.1.3) (SEQ ID NO: 81); A/Anhui/1/05, Genetic Clade 2.3.4 (Anhui_{—}1_{—}05_c2.3.4) (SEQ ID NO: 82); A/Egypt/2786-NAMRU3/06, Genetic Clade 2.2 (Egypt_{—}2876-N3_{—}06_c2.2) (SEQ ID NO: 83); A/goose/Guiyang/337/06, Genetic Clade 4 (Go_Guiy_{—}337_{—}06_c4) (SEQ ID NO: 84); A/Egypt/2321-NAMRU3/07, Genetic Clade 2.2.1 (Egypt_{—}2321-N3_{—}07_c2.2.1) (SEQ ID NO: 85); A/Egypt/3300-NAMRU3/08, Genetic Clade 2.2.1 (Egypt_{—}3300-N3_{—}08_c.2.2.1) (SEQ ID NO: 86); A/common magpie/Hong Kong/5052/07, Genetic Clade 2.3.2 (Mag_HK_{—}5052_{—}07_c.2.3.2) (SEQ ID NO: 87); A/Chicken/Vietnam/NCVD-016/2008, Genetic Clade 7 (Ck_Viet_NCVD-016_{—}08_c7) (SEQ ID NO: 88).

[0027] FIG. 14: Adapted from Stevens et al., 2008, J. Mol. Biol., 381:1382-94. Viet0304: A/Vietnam/1203/04. Ind505: A/Indonesia/5/05. LS: Q226L and G228S mutations RBS of HA.

[0028] FIG. 15: Viet0304-LS and Viet0304-RLS (equivalent to Ind505-LS) HAs were analyzed in a dose-dependent fashion on our glycan array comprising of representative avian and human receptors. Both mutants showed minimal α2-6 binding (binding signals observed only at high HA concentration), which contrasts with the high affinity α2-6 binding shared by human adapted HAs.

[0029] FIG. 16: Dose dependent analysis of H5N1 HAs that lack glycosylation at N158 in the context of LS mutation. Removal of glycosylation at N158 in the context of LS mutation increased human receptor binding affinity to the same range (Kd′˜20 pM) as observed for human adapted H1N1 and H2N2 HAs. Removal of glycosylation at N158 on H5 HA template with Q226L mutation alone (i.e., without G228S of the LS mutation) showed improved preference to human receptors (over avian receptors), but substantially lowered human receptor-binding affinity in comparison with N158-deglycosylated LS mutant.

[0030] FIG. 17: Comparing salient features of RBS between human adapted H2N2 HA (Alb6_{—}58) and H5N1 (Viet1203_{—}04) HA. Four differences in H2N2 HA as compared with H5N1 HA include: (1) Composition of 130 loop in H2N2 HA which includes a deletion, (2) lack of glycosylation at 158 position in H2N2 HA, (3) amino acid composition of the base of the RBS involving positions 137, 221, 226 and 228, and (4) amino acid composition at top of the RBS involving positions 188, 192 and 193.

[0031] FIG. 18: Comparison of the RBS of the H5 HA mutants with that of H2N2 HA. Alb6_{—}58_H2N2 (SEQ ID NO: 89): A/Albany/6/58 H2N2 HA; Viet1203_{—}04_D (SEQ ID NO: 90): modified version of A/Vietnam/1203/04 HA; Viet1203_{—}04_D_H2RBS (SEQ ID NO: 91): mutant of Viet1203_{—}04_D with deletion at 130 and 13 amino acid substitutions; Viet1203_{—}04_D_H2RBSmin (SEQ ID NO: 92): mutant of Viet1203_{—}04_D with deletion at 130 and 7 substitutions; ckEgy_{—}07 (SEQ ID NO: 93): A/chicken/Egypt/R2/2007 H5N1 HA that already has deletion at 130; ckEgy_{—}07_H2RBS (SEQ ID NO: 94): mutant of ckEgy_{—}07 with 8 substitutions; ckViet_{—}08 (SEQ ID NO: 95): A/chicken/Vietnam/NCVD-093/2008 H5N1 HA that already has switch in charge at 192 and 193 positions; ckViet_{—}08_H2RBS (SEQ ID NO: 96): mutant of ckViet_{—}08 with deletion at 130 and 6 substitutions; ckViet_{—}08H2RBSmin (SEQ ID NO: 97): mutant of ckViet_{—}08 with deletion at 130 and 4 substitutions. The residue positions that are substituted are in bold and highlighted. The deletion in 130 loop is shown in bold highlighted. Glycosylation at 158 is highlighted.

[0032] FIG. 19: Dose dependent analysis of mutant of H5N1 HA (Viet1203_{—}04_D_H2RBS) designed such that the molecular composition of its RBS mimics that of human-adapted H2N2 HA. This mutant shows highly specific high affinity binding to human receptors that is characteristic of other human adapted HAs. The binding affinity of this mutant to human receptor (6′SLN-LN) is quantified by Kd′˜3 pM that is in the same range as that of human adapted H1N1 and H2N2 HAs.

[0033] FIG. 20: Characteristic glycan-receptor binding properties of pandemic HAs The HAs from prototypic human-adapted pandemic 1918 H1N1 (S1) and 1958 H2N2 (S2) and 2009 H1N1 (S3) strains show specific high affinity binding to human receptors (6′SLN-LN) with minimal to substantially lower affinity binding (relative to human receptor affinity) to avian receptors (3′SLN-LN). On the other hand introducing the hallmark LS mutation in Viet1203_{—}04 H5N1 HA sequence does not switch its receptor preference to the human receptor binding seen with the pandemic HAs.

[0034] FIG. 21: Phylogeny tree of representative sequences from HA subtypes Branches leading to clade 1 & 2 HAs are labeled and colored in red and blue, respectively. Closely related subtypes are located on branches close to one another.

[0035] FIG. 22: Key structural features within the RBS of H5 HA

Shown in the figure is the cartoon rendering of RBS of Alb6_{—}58 HA (gray) and Viet0304 (green) with side chains of amino acids that are different between these HAs. The four features that distinguish the H2 and H5 RBS as described in the text are highlighted in dotted red circles.

[0036] FIG. 23: Sequence alignment of RBS of representative H2 and H5 HAs

HA sequences from the pandemic H2N2 strain (A/Albany/6/58 or A1b58) (SEQ ID NO: 98), representative human isolates from 1997-2006 (A/Hong Kong/486/97 or HK_{—}486_{—}97 (SEQ ID NO: 105), A/Hong Kong/213/03 or HK_{—}213_{—}03 (SEQ ID NO: 104), A/Vietnam/1203/04 or Viet1203_{—}04 (SEQ ID NO: 103), A/Indonesia/5/05 or Ind_{—}5_{—}05 (SEQ ID NO: 102), A/Egypt/2786-NAMRU3 or Egy_{—}2786-N3_{—}06 (SEQ ID NO: 101)) along with the chosen H5 HA template (A/chicken/Egypt/R2/07 or ckEgy_{—}07 (SEQ ID NO: 100)) for introducing LS mutation (ckEgy_{—}07mutv5.3 (SEQ ID NO: 99)) are aligned.

[0037] FIG. 24: Glycan receptor-binding properties of ckEgy_{—}07 and ckE_{—}07 harboring LS amino acid changes

Dose-dependent direct glycan-binding of HAs were performed on a glycan array platform comprising of representative human and avian receptors. A, the wild-type ckEgy_{—}07 HA shows the typical specific and high affinity avian-receptor binding characteristic of other wild-type H5N1 HAs. B, Introduction of the LS mutations on this HA quantitatively shifts its specificity to human receptor (6′SLN-LN) and substantially reducing its avian receptor binding to a minimal level. C, binding of ckEgy 07 LS mutant to physiological human receptors expressed predominantly on apical surface of human tracheal tissue section. The human receptor specificity and affinity from the dose-dependent binding profile together with the human tracheal tissue staining of the mutant HA is such that it may be sufficient to confer aerosol transmission of H5N1 virus harboring this mutant HA in the context of other required changes (such as PB2).

[0038] FIG. 25: Analysis of effect of loss of glycosylation at the 158 position in the context of LS mutations on glycan receptor binding of H5 HA

A, the ckEgy_{—}07_LS mutant shows a quantitative human receptor switch resembling other pandemic HAs. B, the binding curve for A/California/04/2009 H1N1 HA adapted from previous study (S3) is shown for comparison. C, the T160A mutation in Viet03_{—}04_ALS mutant removes glycosylation sequon at N158 leading to loss of glycosylation at this site. Although this mutant shows dramatic improvement in human receptor-binding, it retains most of its avian receptor-binding that is not characteristic of pandemic HAs and the ckEgy_{—}07_LS mutant (in the top panel). D, LS amino acid mutations introduced in Egy_{—}06 HA sequence that naturally lacks glycosylation at 158 also shows the same binding profile as Viet03_{—}04_ALS mutant.

[0039] FIG. 26: Human-adaptive amino acid changes on H5N1 HA sequence that naturally acquired feature 2

A/chicken/Vietnam/NCVD-093/2008 avian H5N1 HA already acquired amino acid changes in 190-helix where 192 position typically comprising of Thr has mutated to Lys and 193 position typically comprising of Lys/Arg has mutated to Met. Introducing 6 amino acid changes and a deletion to match feature 1 (deletion in 130-loop+A130T) and feature 3 (S137R/S221P/Q226L/S227G/G228S) resulted in a mutant HA that quantitatively switched its preference to human receptors even in the presence of glycosylation at 158. However, introduction of the T160A loss of glycosylation change along with LS, without the 130-loop deletion results in dramatic reduction in binding to human and avian receptors (data not shown). Therefore, for these H5N1 HAs, the deletion in 130-loop is a more critical change than the loss of glycosylation in the context of LS mutation.

[0040] FIG. 27: Emergence of key features in recent avian H5 and human H5N1 isolates

A, Percentage of avian and human H5N1 isolates whose HA has acquired amino acid changes to match features 1 and 4 of H2 HA RBS is plotted as function of year when the strain was isolated. There has been a dramatic increase in percentage of isolates having these key features since their initial emergence in 2007. Phylogenetic analysis of the sequences of these isolates showed that they belonged to clade 2.2.1. B, Percentage of avian and human isolates whose HA has acquired amino acid changes to match feature 2 of H2 HA RBS. Only a small percentage of H5N1 isolates have acquired this feature. Full-length non-redundant HA sequences from NCBI Influenza Virus Resource were aligned, and number of occurrences of each of the features was calculated in a given year and expressed as percentage. A total of 2277 full-length non-redundant H5N1 sequences were employed for the analysis.

[0041] FIG. 28: Expanded nomenclature of glycans used in the glycan array

Neu5Ac: N-acetyl D-neuraminic acid; Gal: D-galactose; GlcNAc: N-acetyl D-glucosamine. α/β: anomeric configuration of the pyranose sugars. All the sugars are linked via a spacer to biotin (-Sp-LC-LC-Biotin as described in www.functionalglycomics.org/static/consortium/resources/resourcecored5.shtml)

### DESCRIPTION OF HA SEQUENCE ELEMENTS

### HA Sequence Element 1

[0042] HA Sequence Element 1 is a sequence element corresponding approximately to residues 97-185 (where residue positions are assigned using H3 HA as reference) of many HA proteins found in natural influenza isolates. This sequence element has the basic structure:

(SEQ ID NO. 106)
C (Y/F) P X₁ C X₂ W X₃ W X₄ H H P,

wherein:
[0043] X₁ is approximately 30-45 amino acids long;
[0044] X₂ is approximately 5-20 amino acids long;
[0045] X₃ is approximately 25-30 amino acids long; and
[0046] X₄ is approximately 2 amino acids long.

[0047] In some embodiments, X₁ is about 35-45, or about 35-43, or about 35, 36, 37, 38, 38, 40, 41, 42, or 43 amino acids long. In some embodiments, X₂ is about 9-15, or about 9-14, or about 9, 10, 11, 12, 13, or 14 amino acids long. In some embodiments, X₃ is about 26-28, or about 26, 27, or 28 amino acids long. In some embodiments, X₄ has the sequence (G/A) (I/V). In some embodiments, X₄ has the sequence GI; in some embodiments, X₄ has the sequence GV; in some embodiments, X₄ has the sequence AI; in some embodiments, X₄ has the sequence AV. In some embodiments, HA Sequence Element 1 comprises a disulfide bond. In some embodiments, this disulfide bond bridges residues corresponding to positions 97 and 139 (based on the canonical H3 numbering system utilized herein).

[0048] In some embodiments, and particularly in H1 polypeptides, X₁ is about 43 amino acids long, and/or X₂ is about 13 amino acids long, and/or X₃ is about 26 amino acids long. In some embodiments, and particularly in H1 polypeptides, HA Sequence Element 1 has the structure:

(SEQ ID NO. 107)
C Y P X_{1A} T (A/T) (A/S) C X₂ W X₃ W X₄ H H P,

wherein:
[0049] X_{1A} is approximately 27-42, or approximately 32-42, or approximately 32-40, or approximately 26-41, or approximately 31-41, or approximately 31-39, or approximately 31, 32, 33, 34, 35, 36, 37, 38, 39, or 40 amino acids long, and X₂-X₄ are as above.

[0050] In some embodiments, and particularly in H1 polypeptides, HA Sequence Element 1 has the structure:

(SEQ ID NO. 108)
C Y P X_{1A} T (A/T) (A/S) C X₂ W (I/L) (TN) X_{3A} W
X₄ H H P,

wherein:
[0051] X_{1A} is approximately 27-42, or approximately 32-42, or approximately 32-40, or approximately 32, 33, 34, 35, 36, 37, 38, 39, or 40 amino acids long,
[0052] X_{3A} is approximately 23-28, or approximately 24-26, or approximately 24, 25, or 26 amino acids long, and X₂ and X₄ are as above.

[0053] In some embodiments, and particularly in H1 polypeptides, HA Sequence Element 1 includes the sequence:

(SEQ ID NO. 109)
Q L S S I S S F E K,

typically within X₁, (including within X_{1A}) and especially beginning about residue 12 of X₁ (as illustrated, for example, in FIGS. 1-3).

[0054] In some embodiments, and particularly in H3 polypeptides, X₁ is about 39 amino acids long, and/or X₂ is about 13 amino acids long, and/or X₃ is about 26 amino acids long.

[0055] In some embodiments, and particularly in H3 polypeptides, HA Sequence Element 1 has the structure:

(SEQ ID NO. 110)
C Y P X_{1A} S (S/N) (A/S) C X₂ W X₃ W X₄ H H P,

wherein:
[0056] X_{1A} is approximately 27-42, or approximately 32-42, or approximately 32-40, or approximately 23-38, or approximately 28-38, or approximately 28-36, or approximately 28, 29, 30, 31, 32, 33, 34, 35, 36, 37, 38, 39, or 40 amino acids long, and X₂-X₄ are as above.

[0057] In some embodiments, and particularly in H3 polypeptides, HA Sequence Element 1 has the structure:

(SEQ ID NO. 111)
C Y P X_{1A} S (S/N) (A/S) C X₂ W L (T/H) X_{3A} W X₄ H
H P,

wherein:
[0058] X_{1A} is approximately 27-42, or approximately 32-42, or approximately 32-40, or approximately 32, 33, 34, 35, 36, 37, 38, 39, or 40 amino acids long,
[0059] X_{3A} is approximately 23-28, or approximately 24-26, or approximately 24, 25, or 26 amino acids long, and X₂ and X₄ are as above.

[0060] In some embodiments, and particularly in H3 polypeptides, HA Sequence Element 1 includes the sequence:

(SEQ ID NO. 112)
(L/I) (V/I) A S S G T L E F,

typically within X₁ (including within X_{1A}), and especially beginning about residue 12 of X₁ (as illustrated, for example, in FIGS. 1, 2 and 4).

[0061] In some embodiments, and particularly in H5 polypeptides, X₁ is about 42 amino acids long, and/or X₂ is about 13 amino acids long, and/or X₃ is about 26 amino acids long.

[0062] In some embodiments, and particularly in H5 polypeptides, HA Sequence Element 1 has the structure:

(SEQ ID NO. 113)
C Y P X_{1A} S S A C X₂ W X₃ W X₄ H H P,

wherein:
[0063] X_{1A} is approximately 27-42, or approximately 32-42, or approximately 32-40, or approximately 23-38, or approximately 28-38, or approximately 28-36, or approximately 28, 29, 30, 31, 32, 33, 34, 35, 36, 37, 38, 39, or 40 amino acids long, and X₂-X₄ are as.

[0064] In some embodiments, and particularly in H5 polypeptides, HA Sequence Element 1 has the structure:

(SEQ ID NO. 114)
C Y P X_{1A} S S A C X₂ W L I X_{3A} W X₄ H H P,

wherein:
[0065] X_{1A} is approximately 27-42, or approximately 32-42, or approximately 32-40, or approximately 32, 33, 34, 35, 36, 37, 38, 39, or 40 amino acids long, and
[0066] X_{3A} is approximately 23-28, or approximately 24-26, or approximately 24, 25, or 26 amino acids long, and X₂ and X₄ are as above.

[0067] In some embodiments, and particularly in H5 polypeptides, HA Sequence Element 1 is extended (i.e., at a position corresponding to residues 186-193) by the sequence:

(SEQ ID NO. 115)
N D A A E X X (K/R)

[0068] In some embodiments, and particularly in H5 polypeptides, HA Sequence Element 1 includes the sequence:

(SEQ ID NO. 116)
Y E E L K H L X S X X N H F E K,

typically within X₁, and especially beginning about residue 6 of X₁ (as illustrated, for example, in FIGS. 1, 2, and 5).

### HA Sequence Element 2

[0069] HA Sequence Element 2 is a sequence element corresponding approximately to residues 324-340 (again using a numbering system based on H3 HA) of many HA proteins found in natural influenza isolates. This sequence element has the basic structure:

(SEQ ID NO. 117)
G A I A G F I E

In some embodiments, HA Sequence Element 2 has the sequence:

(SEQ ID NO. 118)
P X₁ G A I A G F I E,

wherein:
[0070] X₁ is approximately 4-14 amino acids long, or about 8-12 amino acids long, or about 12, 11, 10, 9 or 8 amino acids long. In some embodiments, this sequence element provides the HA0 cleavage site, allowing production of HA1 and HA2.

[0071] In some embodiments, and particularly in H1 polypeptides, HA Sequence Element 2 has the structure:

(SEQ ID NO. 119)
P S (I/V) Q S R X_{1A} G A I A G F I E,

wherein:
[0072] X_{1A} is approximately 3 amino acids long; in some embodiments, X_{1A} is G (L/I) F.

[0073] In some embodiments, and particularly in H3 polypeptides, HA Sequence Element 2 has the structure:

(SEQ ID NO. 120)
P X K X T R X_{1A} G A I A G F I E,

wherein:
[0074] X_{1A} is approximately 3 amino acids long; in some embodiments, X_{1A} is G (L/I) F.

[0075] In some embodiments, and particularly in H5 polypeptides, HA Sequence Element 2 has the structure:

(SEQ ID NO. 121)
P Q R X X X R X X R X_{1A} G A I A G F I E,

wherein:
[0076] X_{1A} is approximately 3 amino acids long; in some embodiments, X_{1A} is G (L/I) F.

### DEFINITIONS

[0077] Affinity: As is known in the art, “affinity” is a measure of the tightness with a particular ligand (e.g., an HA polypeptide) binds to its partner (e.g., and HA receptor). Affinities can be measured in different ways.

[0078] Binding: It will be understood that the term “binding”, as used herein, typically refers to a non-covalent association between or among agents. In many embodiments herein, binding is addressed with respect to particular glycans (e.g., umbrella topology glycans or cone topology glycans). It will be appreciated by those of ordinary skill in the art that such binding may be assessed in any of a variety of contexts. In some embodiments, binding is assessed with respect to free glycans. In some embodiments, binding is assessed with respect to glycans attached (e.g., covalently linked to) a carrier. In some such embodiments, the carrier is a polypeptide. In some embodiments, binding is assessed with respect to glycans attached to an HA receptor. In such embodiments, reference may be made to receptor binding or to glycan binding.

[0079] Binding agent: In general, the term “binding agent” is used herein to refer to any entity that binds to glycans (e.g., to umbrella-topology glycans) as described herein. Binding agents may be of any chemical type. In some embodiments, binding agents are polypeptides (including, e.g., antibodies or antibody fragments); in some such embodiments, binding agents are HA polypeptides and/or variants thereof and/or characteristic portions thereof; in some embodiments, binding agents are polypeptides whose amino acid sequence does not include an HA characteristic sequence (i.e., “Non-HA polypeptides”). In some embodiments, binding agents are small molecules. In some embodiments, binding agents are nucleic acids. In some embodiments, binding agents are aptamers. In some embodiments, binding agents are polymers; in some embodiments, binding agents are non-polymeric. In some embodiments, binding agents are carbohydrates. In some embodiments, binding agents are lectins. In some embodiments, binding agents as described herein bind to sialylated glycans having an umbrella-like topology. In some embodiments, binding agents bind to umbrella-topology glycans with high affinity and/or specificity. In some embodiments, binding agents show a binding preference for umbrella-topology glycans as compared with cone-topology glycans. In some embodiments, binding agents compete with hemagglutinin for binding to glycans on hemagglutinin receptors. In some embodiments, binding agents compete with hemagglutinin for binding to umbrella-topology glycans. In some embodiments, a binding agent provided herein is an umbrella topology blocking agent. In some embodiments, a binding agent provided herein is an umbrella topology specific blocking agent. In some embodiments, binding agents bind to umbrella topology glycan mimics.

[0080] Biologically active: As used herein, the phrase “biologically active” refers to a characteristic of any agent that has activity in a biological system, and particularly in an organism. For instance, an agent that, when administered to an organism, has a biological effect on that organism, is considered to be biologically active. In some embodiments, where a protein or polypeptide is biologically active, a portion of that protein or polypeptide that shares at least one biological activity of the protein or polypeptide is typically referred to as a “biologically active” portion.

[0081] Characteristic portion: As used herein, the phrase a “characteristic portion” of a protein or polypeptide is one that contains a continuous stretch of amino acids, or a collection of continuous stretches of amino acids, that together are characteristic of a protein or polypeptide. Each such continuous stretch generally will contain at least two amino acids. Furthermore, those of ordinary skill in the art will appreciate that typically at least 5, at least 10, at least 15, at least 20 or more amino acids are required to be characteristic of a protein. In general, a characteristic portion is one that, in addition to the sequence identity specified above, shares at least one functional characteristic with the relevant intact protein.

[0082] Characteristic sequence: A “characteristic sequence” is a sequence that is found in all members of a family of polypeptides or nucleic acids, and therefore can be used by those of ordinary skill in the art to define members of the family.

[0083] Cone topology: The phrase “cone topology” is used herein to refer to a 3-dimensional arrangement adopted by certain glycans and in particular by glycans on HA receptors. As illustrated in FIG. 6, the cone topology can be adopted by α2-3 sialylated glycans or by α2-6 sialylated glycans, and is typical of short oligonucleotide chains, though some long oligonucleotides can also adopt this conformation. The cone topology is characterized by the glycosidic torsion angles of Neu5Acα2-3Gal linkage which samples three regions of minimum energy conformations given by φ (C1-C2-O—C3/C6) value of about −60, about 60, or about 180 and ψ (C2-O—C3/C6-H3/C5) samples −60 to 60 (FIG. 11). FIG. 8 presents certain representative (though not exhaustive) examples of glycans that adopt a cone topology.

[0084] Corresponding to: As used herein, the term “corresponding to” is often used to designate the position/identity of an amino acid residue in an HA polypeptide. Those of ordinary skill will appreciate that, for purposes of simplicity, a canonical numbering system (based on wild type H3 HA) is utilized herein (as illustrated, for example, in FIGS. 1-5), so that an amino acid “corresponding to” a residue at position 190, for example, need not actually be the 190^{th} amino acid in a particular amino acid chain but rather corresponds to the residue found at 190 in wild type H3 HA; those of ordinary skill in the art readily appreciate how to identify corresponding amino acids.

[0085] Degree of separation removed: As used herein, amino acids that are a “degree of separation removed” are HA amino acids that have indirect effects on glycan binding. For example, one-degree-of-separation-removed amino acids may either: (1) interact with the direct-binding amino acids; and/or (2) otherwise affect the ability of direct-binding amino acids to interact with glycan that is associated with host cell HA receptors; such one-degree-of-separation-removed amino acids may or may not directly bind to glycan themselves. Two-degree-of-separation-removed amino acids either (1) interact with one-degree-of-separation-removed amino acids; and/or (2) otherwise affect the ability of the one-degree-of-separation-removed amino acids to interact with direct-binding amino acids, etc.

[0086] Direct-binding amino acids: As used herein, the phrase “direct-binding amino acids” refers to HA polypeptide amino acids which interact directly with one or more glycans that is associated with host cell HA receptors.

[0087] Engineered: The term “engineered”, as used herein, describes a polypeptide whose amino acid sequence has been selected by man. For example, an engineered HA polypeptide has an amino acid sequence that differs from the amino acid sequences of HA polypeptides found in natural influenza isolates. In some embodiments, an engineered HA polypeptide has an amino acid sequence that differs from the amino acid sequence of HA polypeptides included in the NCBI database.

[0088] H1 polypeptide: An “H1 polypeptide”, as that term is used herein, is an HA polypeptide whose amino acid sequence includes at least one sequence element that is characteristic of H1 and distinguishes H1 from other HA subtypes. Representative such sequence elements can be determined by alignments such as, for example, those illustrated in FIGS. 1-3 and include, for example, those described herein with regard to H1-specific embodiments of HA Sequence Elements.

[0089] H3 polypeptide: An “H3 polypeptide”, as that term is used herein, is an HA polypeptide whose amino acid sequence includes at least one sequence element that is characteristic of H3 and distinguishes H3 from other HA subtypes. Representative such sequence elements can be determined by alignments such as, for example, those illustrated in FIGS. 1, 2, and 4 and include, for example, those described herein with regard to H3-specific embodiments of HA Sequence Elements.

[0090] H5 polypeptide: An “H5 polypeptide”, as that term is used herein, is an HA polypeptide whose amino acid sequence includes at least one sequence element that is characteristic of H5 and distinguishes H5 from other HA subtypes. Representative such sequence elements can be determined by alignments such as, for example, those illustrated in FIGS. 1, 2, and 5 and include, for example, those described herein with regard to H5-specific embodiments of HA Sequence Elements.

[0091] HX polypeptide: An “HX polypeptide”, as that term is used herein, is an HA polypeptide whose amino acid sequence includes at least one sequence element that is characteristic of HX and distinguishes HX from other HA subtypes, wherein “X” refers to the numbering of the HA subtype (e.g., wherein when “X”=1, 2, 3, 4, 5, 6, 7, 8, 9, 10, 11, 12, 13, 14, 15, or 16, “HX”=H1, H2, H3, H4, H5, H6, H7, H8, H9, H10, H11, H12, H13, H14, H15, or H16, respectively).

[0092] Hemagglutinin (HA) polypeptide: As used herein, the term “hemagglutinin polypeptide” (or “HA polypeptide’) refers to a polypeptide whose amino acid sequence includes at least one characteristic sequence of HA. A wide variety of HA sequences from influenza isolates are known in the art; indeed, the National Center for Biotechnology Information (NCBI) maintains a database (www.ncbi.nlm.nih.gov/genomes/FLU/flu.html) that, as of the filing of the present application included 9796 HA sequences. Those of ordinary skill in the art, referring to this database, can readily identify sequences that are characteristic of HA polypeptides generally, and/or of particular HA polypeptides (e.g., H1, H2, H3, H4, H5, H6, H7, H8, H9, H10, H11, H12, H13, H14, H15, or H16 polypeptides); or of HAs that mediate infection of particular hosts, e.g., avian, camel, canine, cat, civet, environment, equine, human, leopard, mink, mouse, seal, stone martin, swine, tiger, whale, etc. For example, in some embodiments, an HA polypeptide includes one or more characteristic sequence elements found between about residues 97 and about 185, about 324 and about 340, about 96 and about 100, and/or about 130 and about 230 of an HA protein found in a natural isolate of an influenza virus. In some embodiments, an HA polypeptide has an amino acid sequence comprising at least one of HA Sequence Elements 1 and 2, as defined herein. In some embodiments, an HA polypeptide has an amino acid sequence comprising HA Sequence Elements 1 and 2, in some embodiments separated from one another by about 100 to about 200, or by about 125 to about 175, or about 125 to about 160, or about 125 to about 150, or about 129 to about 139, or about 129, about 130, about 131, about 132, about 133, about 134, about 135, about 136, about 137, about 138, or about 139 amino acids. In some embodiments, an HA polypeptide has an amino acid sequence that includes residues at positions within the regions 96-100 and/or 130-230 that participate in glycan binding. For example, many HA polypeptides include one or more of the following residues: Tyr98, Ser/Thr136, Trp153, His183, and Leu/Ile194. In some embodiments, an HA polypeptide includes at least 2, 3, 4, or all 5 of these residues.

[0093] Isolated: The term “isolated”, as used herein, refers to an agent or entity that has either (i) been separated from at least some of the components with which it was associated when initially produced (whether in nature or in an experimental setting); or (ii) produced by the hand of man. Isolated agents or entities may be separated from at least about 10%, at least about 20%, at least about 30%, at least about 40%, at least about 50%, at least about 60%, at least about 70%, at least about 80%, at least about 90%, or more of the other components with which they were initially associated. In some embodiments, isolated agents are more than 90%, 91%, 92%, 93%, 94%, 95%, 96%, 97%, 98%, 99% pure.

[0094] Linkage Specific Blocking Agent (LSBA): As used herein, the term “linkage specific blocking agent” refers to an agent which binds to an HA receptor having an α2-6 sialylated glycan. In some embodiments, an LSBA selectively binds to an HA receptor having an α2-6 sialylated glycan with at least about 40, 50, or 75% of the affinity of that for an HA receptor having an α2-3 sialylated glycan. In some embodiments, an LSBA selectively binds to an HA receptor having an α2-6 sialylated glycan with at least about 2, 4, 5, or 10 times greater affinity than that for an HA receptor having an α2-3 sialylated glycan. In some embodiments, an LSBA has an affinity for an α2-6 sialylated glycan that is at least 50, 100, 150, or 200% of its affinity for an α2-3 sialylated glycan. In some embodiments, an LSBA may compete with hemagglutinin for binding to an HA receptor. For example, an LSBA may selectively inhibit the binding of an influenza virus particle (e.g., human or avian influenza virus) to an HA receptor based on the linkage characteristics (e.g., α2-6 sialylated glycan or α2-3 sialylated glycan). In some embodiments, an LSBA is a polypeptide. In some such embodiments, an LSBA polypeptide has an amino acid sequence that is substantially identical or substantially homologous to that of a naturally-occurring polypeptide. In some embodiments, an LSBA polypeptide is an HA polypeptide. In some embodiments, an LSBA polypeptide is a naturally-occurring HA polypeptide, or a fragment thereof. In some embodiments, an LSBA polypeptide has an amino acid sequence that is not related to that of an HA polypeptide. In some embodiments, an LSBA polypeptide is an antibody or fragment thereof. In some embodiments, an LSBA polypeptide is a lectin (e.g., SNA-1). In some embodiments, an LSBA is not a polypeptide. In some embodiments, an LSBA is a small molecule. In some embodiments, an LSBA is a nucleic acid.

[0095] Long oligosaccharide: For purposes of the present disclosure, an oligosaccharide is typically considered to be “long” if it includes at least one linear chain that has at least four saccharide residues.

[0096] Non-natural amino acid: The phrase “non-natural amino acid” refers to an entity having the chemical structure of an amino acid (i.e.,:

[chemical structure]

and therefore being capable of participating in at least two peptide bonds, but having an R group that differs from those found in nature. In some embodiments, non-natural amino acids may also have a second R group rather than a hydrogen, and/or may have one or more other substitutions on the amino or carboxylic acid moieties.

[0097] Polypeptide: A “polypeptide”, generally speaking, is a string of at least two amino acids attached to one another by a peptide bond. In some embodiments, a polypeptide may include at least 3-5 amino acids, each of which is attached to others by way of at least one peptide bond. Those of ordinary skill in the art will appreciate that polypeptides sometimes include “non-natural” amino acids or other entities that nonetheless are capable of integrating into a polypeptide chain, optionally.

[0098] Pure: As used herein, an agent or entity is “pure” if it is substantially free of other components. For example, a preparation that contains more than about 90% of a particular agent or entity is typically considered to be a pure preparation. In some embodiments, an agent or entity is at least 91%, at least 92%, at least 93%, at least 94%, at least 95%, at least 96%, at least 97%, at least 98%, or at least 99% pure.

[0099] Short oligosaccharide: For purposes of the present disclosure, an oligosaccharide is typically considered to be “short” if it has fewer than 4, or certainly fewer than 3, residues in any linear chain.

[0100] Specificity: As is known in the art, “specificity” is a measure of the ability of a particular ligand (e.g., an HA polypeptide) to distinguish its binding partner (e.g., a human HA receptor, and particularly a human upper respiratory tract HA receptor) from other potential binding partners (e.g., an avian HA receptor).

[0101] Substantial homology: The phrase “substantial homology” is used herein to refer to a comparison between amino acid or nucleic acid sequences. As will be appreciated by those of ordinary skill in the art, two sequences are generally considered to be “substantially homologous” if they contain homologous residues in corresponding positions. Homologous residues may be identical residues. Alternatively, homologous residues may be non-identical residues will appropriately similar structural and/or functional characteristics. For example, as is well known by those of ordinary skill in the art, certain amino acids are typically classified as “hydrophobic” or “hydrophilic” amino acids, and/or as having “polar” or “non-polar” side chains. Substitution of one amino acid for another of the same type may often be considered a “homologous” substitution. Typical amino acid categorizations are summarized below:

| | | | | | |
|---|---|---|---|---|---|
| Alanine | Ala | A | nonpolar | neutral | 1.8 |
| Arginine | Arg | R | polar | positive | −4.5 |
| Asparagine | Asn | N | polar | neutral | −3.5 |
| Aspartic | Asp | D | polar | negative | −3.5 |
| acid | | | | | |
| Cysteine | Cys | C | nonpolar | neutral | 2.5 |
| Glutamic | Glu | E | polar | negative | −3.5 |
| acid | | | | | |
| Glutamine | Gln | Q | polar | neutral | −3.5 |
| Glycine | Gly | G | nonpolar | neutral | −0.4 |
| Histidine | His | H | polar | positive | −3.2 |
| Isoleucine | Ile | I | nonpolar | neutral | 4.5 |
| Leucine | Leu | L | nonpolar | neutral | 3.8 |
| Lysine | Lys | K | polar | positive | −3.9 |
| Methionine | Met | M | nonpolar | neutral | 1.9 |
| Phenylalanine | Phe | F | nonpolar | neutral | 2.8 |
| Proline | Pro | P | nonpolar | neutral | −1.6 |
| Serine | Ser | S | polar | neutral | −0.8 |
| Threonine | Thr | T | polar | neutral | −0.7 |
| Tryptophan | Trp | W | nonpolar | neutral | −0.9 |
| Tyrosine | Tyr | Y | polar | neutral | −1.3 |
| Valine | Val | V | nonpolar | neutral | 4.2 |

| Ambiguous Amino Acids | 3-Letter | 1-Letter |
|---|---|---|
| Asparagine or aspartic acid | Asx | B |
| Glutamine or glutamic acid | Glx | Z |
| Leucine or Isoleucine | Xle | J |
| Unspecified or unknown amino acid | Xaa | X |

As is well known in this art, amino acid or nucleic acid sequences may be compared using any of a variety of algorithms, including those available in commercial computer programs such as BLASTN for nucleotide sequences and BLASTP, gapped BLAST, and PSI-BLAST for amino acid sequences. Exemplary such programs are described in Altschul, et al., Basic local alignment search tool, J. Mol. Biol., 215(3): 403-410, 1990; Altschul, et al., Methods in Enzymology; Altschul, et al., “Gapped BLAST and PSI-BLAST: a new generation of protein database search programs”, Nucleic Acids Res. 25:3389-3402, 1997; Baxevanis, et al., Bioinformatics: A Practical Guide to the Analysis of Genes and Proteins, Wiley, 1998; and Misener, et al., (eds.), Bioinformatics Methods and Protocols (Methods in Molecular Biology, Vol. 132), Humana Press, 1999; all of the foregoing of which are incorporated herein by reference. In addition to identifying homologous sequences, the programs mentioned above typically provide an indication of the degree of homology. In some embodiments, two sequences are considered to be substantially homologous if at least 50%, at least 55%, at least 60%, at least 65%, at least 70%, at least 75%, at least 80%, at least 85%, at least 90%, at least 91%, at least 92%, at least 93%, at least 94%, at least 95%, at least 96%, at least 97%, at least 98%, at least 99% or more of their corresponding residues are homologous over a relevant stretch of residues. In some embodiments, the relevant stretch is a complete sequence. In some embodiments, the relevant stretch is at least 10, at least 15, at least 20, at least 25, at least 30, at least 35, at least 40, at least 45, at least 50, at least 55, at least 60, at least 65, at least 70, at least 75, at least 80, at least 85, at least 90, at least 95, at least 100, at least 125, at least 150, at least 175, at least 200, at least 225, at least 250, at least 275, at least 300, at least 325, at least 350, at least 375, at least 400, at least 425, at least 450, at least 475, at least 500 or more residues.

[0102] Substantial identity: The phrase “substantial identity” is used herein to refer to a comparison between amino acid or nucleic acid sequences. As will be appreciated by those of ordinary skill in the art, two sequences are generally considered to be “substantially identical” if they contain identical residues in corresponding positions. As is well known in this art, amino acid or nucleic acid sequences may be compared using any of a variety of algorithms, including those available in commercial computer programs such as BLASTN for nucleotide sequences and BLASTP, gapped BLAST, and PSI-BLAST for amino acid sequences. Exemplary such programs are described in Altschul, et al., Basic local alignment search tool, J. Mol. Biol., 215(3): 403-410, 1990; Altschul, et al., Methods in Enzymology; Altschul, et al., “Gapped BLAST and PSI-BLAST: a new generation of protein database search programs”, Nucleic Acids Res. 25:3389-3402, 1997; Baxevanis, et al., Bioinformatics: A Practical Guide to the Analysis of Genes and Proteins, Wiley, 1998; and Misener, et al., (eds.), Bioinformatics Methods and Protocols (Methods in Molecular Biology, Vol. 132), Humana Press, 1999; all of the foregoing of which are incorporated herein by reference. In addition to identifying identical sequences, the programs mentioned above typically provide an indication of the degree of identity. In some embodiments, two sequences are considered to be substantially identical if at least 50%, at least 55%, at least 60%, at least 65%, at least 70%, at least 75%, at least 80%, at least 85%, at least 90%, at least 91%, at least 92%, at least 93%, at least 94%, at least 95%, at least 96%, at least 97%, at least 98%, at least 99% or more of their corresponding residues are identical over a relevant stretch of residues. In some embodiments, the relevant stretch is a complete sequence. In some embodiments, the relevant stretch is at least 10, at least 15, at least 20, at least 25, at least 30, at least 35, at least 40, at least 45, at least 50, at least 55, at least 60, at least 65, at least 70, at least 75, at least 80, at least 85, at least 90, at least 95, at least 100, at least 125, at least 150, at least 175, at least 200, at least 225, at least 250, at least 275, at least 300, at least 325, at least 350, at least 375, at least 400, at least 425, at least 450, at least 475, at least 500 or more residues.

[0103] Therapeutic agent: As used herein, the phrase “therapeutic agent” refers to any agent that elicits a desired biological or pharmacological effect.

[0104] Treatment: As used herein, the term “treatment” refers to any method used to alleviate, delay onset, reduce severity or incidence, or yield prophylaxis of one or more symptoms or aspects of a disease, disorder, or condition. For the purposes of the present invention, treatment can be administered before, during, and/or after the onset of symptoms.

[0105] Umbrella topology: The phrase “umbrella topology” is used herein to refer to a 3-dimensional arrangement adopted by certain glycans and in particular by glycans on HA receptors. The present invention encompasses the recognition that binding to umbrella topology glycans is characteristic of HA proteins that mediate infection of human hosts. As illustrated in FIG. 6, the umbrella topology is typically adopted only by α2-6 sialylated glycans, and is typical of long (e.g., greater than tetrasaccharide) oligosaccharides. In some embodiments, umbrella-topology glycans are glycans exhibiting a three-dimensional structure substantially similar to the structure presented in FIG. 6 (right panel). In some embodiments, umbrella-topology glycans are glycans which contact HA polypeptides via the amino acid residues shown in FIG. 6 (right panel). In some embodiments, umbrella-topology glycans are glycans which are able to contact and/or specifically bind to the amino acid binding pocket shown in FIG. 6 (right panel). In some embodiments, glycan structural topology is classified based on parameter θ defined as angle between C₂ of Sia, C₁ of Gal, and C₁ of GlcNAc. Values of θ<100° represent cone-like topology adopted by α2-3 and short α2-6 glycans. Values of θ>110° represent umbrella-like topology, such as topology adopted by long α2-6 glycans (FIG. 6). An example of umbrella topology is given by φ angle of Neu5Acα2-6Gal linkage of around −60 (see, for example, FIG. 11). FIG. 9 presents certain representative (though not exhaustive) examples of glycans that can adopt an umbrella topology. The long α2-6 motifs presented in FIG. 9 includes Neu5Acα2-6 linked at the non-reducing end to a long chain (e.g., at least a trisaccharide) found as a part of biological N-linked glycans, O-linked glycans, and glycolipids. The boxed inset shows examples of the umbrella-topology long α2-6 glycan moieties that are found as a part of biological glycans that bind to high affinity with HA. In some embodiments, umbrella-topology glycans (e.g., at a site) comprise a greater proportion of long (e.g. multiple lactosamine units) α2-6 oligosaccharide branches than short α2-6 (e.g. single lactosamine) branches. In some embodiments, umbrella-topology glycans (e.g., at a site) comprise about 2-fold, about 3-fold, about 4-fold, about 5-fold, about 10-fold, about 20-fold, about 50-fold, or greater than about 50-fold more long α2-6 oligosaccharide branches than short α2-6 (e.g. single lactosamine) branches. In some embodiments, the unique characteristic of HA interactions with umbrella-topology glycans and/or glycan decoys is the HA contact with a glycan comprising sialic acid (SA) and/or SA analogs at the non-reducing end. In some embodiments, chain length of the oligosaccharide is at least a trisaccharide (excluding the SA or SA analog). In some embodiments, a combination of the numbered residues shown in the right-hand panel of FIG. 6 is involved in contacts with umbrella-like topology. In some embodiments, umbrella topology glycans are oligosaccharides of the following form:

[0106] Neu5Acα2-6Sug1-Sug2-Sug3

[0107] where:
[0108] (a) NeuSAc α2-6 is typically (but not essentially) at the non-reducing end;
[0109] (b) Sug1:
   [0110] (i) is a hexose (frequently Gal or Glc) or hexosamine (GlcNAc or GalNAc) in α or β configuration (frequently β- for N- and O-linked extension and α- in the case of GalNAcα- that is O-linked to glycoprotein);
   [0111] (ii) no sugars other than Neu5Acα2-6 are attached to any of the non-reducing positions of Sug1 (except when Sug1 is GalNAcα- that is O-linked to the glycoprotein); and/or
   [0112] (iii) non-sugar moieties such as sulfate, phosphate, guanidium, amine, N-acetyl, etc. can be attached to non-reducing positions (typically 6 position) of Sug1 (e.g., to improve contacts with HA);
[0113] (c) Sug2 and/or Sug3 is/are:
   [0114] (i) hexose (frequently Gal or Glc) or hexosamine (GlcNAc or GalNAc) in a or β configuration (frequently β); and/or
   [0115] (ii) sugars (such as Fuc) or non-sugar moieties such as sulfate, phosphate, guanidium, amine, N-acetyl, etc. can be attached to non-reducing positions of Sug2, Sug3, and/or Sug4;
[0116] (d) Linkage between any two sugars in the oligosaccharide apart from Neu5Acα2-6 linkage can be 1-2, 1-3, 1-4, and/or 1-6 (typically 1-3 or 1-4); and/or
[0117] (e) Structure where Neu5Acα2-6 is linked GalNAcα that is O-linked to the glycoprotein and additional sugars are linked to the non-reducing end of GalNAcα for example
   [0118] (i) Neu5Acα2-6(Neu5Acα2-3Galβ1-3)GalNAcα-
   [0119] (ii) Neu5Acα2-6(Galβ1-3)GalNAcα-

[0120] Umbrella topology blocking agent (UTBA): As used herein, the term “umbrella topology blocking agent” refers to an agent which binds to an HA receptor having an umbrella topology glycan. In some embodiments, a UTBA binds to an HA receptor having an umbrella topology glycan found in human upper airways. A UBTA can bind to either an umbrella topology glycan and/or to a cone topology glycan. In some embodiments, a UTBA selectively binds to an umbrella topology glycan with 50, 100, 150, or 200% of its affinity for a cone topology glycan. In some embodiments a UTBA selectively binds to an umbrella topology glycan with 50-150% of its affinity for a cone topology glycan. In some embodiments, a UTBA binds to an umbrella topology glycan with about the same affinity as for a cone topology glycan. For example, in some embodiments, a UTBA binds an umbrella topology glycan (e.g., 6′SLN-LN) with about 50-200%, 50-150%, or about the same affinity to which it binds a cone topology glycan (e.g., 3′SLN-LN). In some embodiments, a UTBA selectively inhibits the binding of an influenza virus particle (e.g., a human or avian influenza virus) to the HA receptor based on the glycan topology of the receptor (e.g., umbrella or cone). In some embodiments, a UTBA is a polypeptide. In some such embodiments, a UTBA polypeptide has an amino acid sequence that is substantially identical or substantially homologous to that of a naturally-occurring polypeptide. In some embodiments, a UTBA polypeptide is an HA polypeptide. In some embodiments, a UTBA polypeptide is a naturally-occurring HA polypeptide, or a fragment thereof. In some embodiments, a UTBA polypeptide has an amino acid sequence that is not related to that of an HA polypeptide. In some embodiments, a UTBA polypeptide is an antibody or fragment thereof. In some embodiments, a UTBA polypeptide is a lectin (e.g., SNA-1). In some embodiments, a UTBA is not a polypeptide. In some embodiments, a UTBA is a small molecule. In some embodiments, a UTBA is a nucleic acid.

[0121] Umbrella topology glycan mimic: An “umbrella topology glycan mimic” is an agent, other than an umbrella topology glycan, that binds to binding agents as described herein. In some embodiments, umbrella topology glycan mimics are agents that bind to HA polypeptides. In some such embodiments, umbrella topology glycan mimics are agents that interact with HA polypeptide residues selected from the group consisting of residues 95, 98, 128, 130, 131, 132, 133, 135, 136, 137, 138, 145, 153, 155, 156, 158, 159, 160, 183, 186, 187, 188, 189, 190, 192, 193, 194, 195, 196, 219, 221, 222, 224, 225, 226, 227, 228, and combinations thereof. In some such embodiments, umbrella topology glycan mimics are agents that interact with HA polypeptide residues selected from the group consisting of residues 130, 131, 132, 133, 135, 137, 155, 188, 192, 193, 221, 226, 227, 228, and combinations thereof. In some such embodiments, umbrella topology glycan mimics are agents that interact with HA polypeptide residues selected from the group consisting of residues 160, 192, 193, and combinations thereof. Note that amino acid positions stated above are based on H3 HA numbering. In some embodiments, an HA topology glycan mimic is an agent that competes with umbrella topology glycans for interaction with an HA polypeptide.

[0122] Umbrella topology specific blocking agent (UTSBA): As used herein, the term “umbrella topology specific blocking agent” refers to an agent which binds to an HA receptor having an umbrella topology glycan found in human upper airways. A UTSBA selectively binds an umbrella topology glycan HA. For example, a UTSBA binds an umbrella topology glycan (e.g., 6′SLN-LN) with about at least 2, at least 4, at least 5, or at least 10 times greater affinity than it binds to a cone topology glycan (e.g., 3′SLN-LN). Typically, the affinity of a UTSBA for an umbrella topology glycan is greater than 1 nM. Typically the affinity of a UTSBA for a cone topology glycan is less is at least within 2 to 3 orders of magnitude of the binding affinity of umbrella topology glycans to human adapted HAs such as SC18, Mos99, Tx91, etc. and α2-6 binding plant lectins such as SNA-I. The binding affinity of UTSBA as measured by the dose-dependent direct binding assay (FIGS. 19 and 20) would typically be at least 1 nM. Typically the affinity of a UTSBA for a cone topology glycan is at most 1 to 3 orders of magnitude less than the binding affinity of cone topology glycans to avian HAs such as Viet0405, Av18, etc. In some embodiments, a UTSBA selectively inhibits binding of an influenza virus particle (e.g., a human or avian influenza virus) to the HA receptor (e.g., an H1, H2 or H3 or a human-adapted H5, H7 or H9) based on glycan topology (e.g., umbrella or cone). In some embodiments, a UTSBA is a polypeptide. In some such embodiments, a UTSBA polypeptide has an amino acid sequence that is that is substantially identical or substantially homologous to that of a naturally-occurring polypeptide. In some embodiments, a UTSBA polypeptide is an HA polypeptide. In some embodiments, a UTSBA polypeptide is a naturally-occurring HA polypeptide, or a fragment thereof. In some embodiments, a UTSBA polypeptide has an amino acid sequence that is not related to that of an HA polypeptide. In some embodiments, a UTSBA polypeptide is an antibody or fragment thereof. In some embodiments, a UTSBA polypeptide is a lectin (e.g., SNA-1). In some embodiments, a UTSBA is not a polypeptide. In some embodiments, a UTSBA is a small molecule. In some embodiments, a UTSBA is a nucleic acid.

[0123] Vaccination: As used herein, the term “vaccination” refers to the administration of a composition intended to generate an immune response, for example to a disease-causing agent. For the purposes of the present invention, vaccination can be administered before, during, and/or after exposure to a disease-causing agent, and in some embodiments, before, during, and/or shortly after exposure to the agent. In some embodiments, vaccination includes multiple administrations, appropriately spaced in time, of a vaccinating composition.

[0124] Variant: As used herein, the term “variant” is a relative term that describes the relationship between a particular polypeptide (e.g., HA polypeptide) of interest and a “parent” polypeptide to which its sequence is being compared. A polypeptide of interest is considered to be a “variant” of a parent polypeptide if the polypeptide of interest has an amino acid sequence that is identical to that of the parent but for a small number of sequence alterations at particular positions. Typically, fewer than 20%, 15%, 10%, 9%, 8%, 7%, 6%, 5%, 4%, 3%, 2% of the residues in the variant are substituted as compared with the parent. In some embodiments, a variant has 10, 9, 8, 7, 6, 5, 4, 3, 2, or 1 substituted residue as compared with a parent. Often, a variant has a very small number (e.g., fewer than 5, 4, 3, 2, or 1) number of substituted functional residues (i.e., residues that participate in a particular biological activity). Furthermore, a variant typically has not more than 5, 4, 3, 2, or 1 additions or deletions, and often has no additions or deletions, as compared with the parent. Moreover, any additions or deletions are typically fewer than about 25, about 20, about 19, about 18, about 17, about 16, about 15, about 14, about 13, about 10, about 9, about 8, about 7, about 6, and commonly are fewer than about 5, about 4, about 3, or about 2 residues. In some embodiments, the parent polypeptide is one found in nature. For example, a parent HA polypeptide may be one found in a natural (e.g., wild type) isolate of an influenza virus (e.g., a wild type HA).

[0125] Vector: As used herein, “vector” refers to a nucleic acid molecule capable of transporting another nucleic acid to which it has been linked. In some embodiment, vectors are capable of extra-chromosomal replication and/or expression of nucleic acids to which they are linked in a host cell such as a eukaryotic or prokaryotic cell. Vectors capable of directing the expression of operatively linked genes are referred to herein as “expression vectors.”

[0126] Wild type: As is understood in the art, the phrase “wild type” generally refers to a normal form of a protein or nucleic acid, as is found in nature. For example, wild type HA polypeptides are found in natural isolates of influenza virus. A variety of different wild type HA sequences can be found in the NCBI influenza virus sequence database, www.ncbi.nlm.nih.gov/genomes/FLU/FLU.html.

### DETAILED DESCRIPTION OF CERTAIN EMBODIMENTS

[0127] The present invention provides binding agents (e.g., HA polypeptides, HA polypeptide variants, LSBAs, UTBAs, UTSBAs, etc.) that bind to umbrella topology glycans. In some embodiments, the present invention provides binding agents that bind to umbrella topology glycans found on HA receptors of a particular target species. For example, in some embodiments, the present invention provides binding agents that bind to umbrella topology glycans found on human HA receptors, e.g., HA receptors found on human epithelial cells, and particularly binding agents that bind to umbrella topology glycans found on human HA receptors in the upper respiratory tract.

[0128] The present invention provides binding agents that bind to HA receptors found on cells in the human upper respiratory tract, and in particular provides binding agents that binds to such receptors (and/or to their glycans, particularly to their umbrella glycans) with a designated affinity and/or specificity.

[0129] In some embodiments, binding agents in accordance with the present invention are or comprise HA polypeptide sequences. In some embodiments, binding agents in accordance with the present invention comprise an HA polypeptide sequence which differs from a parent naturally-occurring HA polypeptide sequence at one or more of residues selected from the group consisting of residues 130, 131, 132, 133, 135, 137, 155, 188, 192, 193, 221, 226, 227, 228, and combinations thereof. In some embodiments, binding agents in accordance with the present invention comprise an HA polypeptide sequence which differs from a parent naturally-occurring HA polypeptide sequence at one or more of residues selected from the group consisting of residues 160, 192, 193, and combinations thereof.

[0130] The present invention encompasses the recognition that gaining an ability to bind umbrella topology glycans (e.g., long α2-6 sialylated glycans), and particularly an ability to bind with high affinity, may confer upon an HA polypeptide variant the ability to infect humans (where its parent HA polypeptide cannot). Without wishing to be bound by any particular theory, the present inventors propose that binding to umbrella topology glycans may be paramount, and in particular that loss of binding to other glycan types may not be required.

[0131] The present invention further provides various reagents and methods associated with binding agents in accordance with the invention (e.g., HA polypeptides, HA polypeptide variants, UTBAs, UTSBAs, etc.) including, for example, systems for identifying them, strategies for preparing them, antibodies that bind to them, and various diagnostic and therapeutic methods relating to them. Further description of certain embodiments of these aspects, and others, of the present invention, is presented below.

### Hemagglutinin (HA)

[0132] Influenza viruses are RNA viruses which are characterized by a lipid membrane envelope containing two glycoproteins, hemagglutinin (HA) and neuraminidase (NA), embedded in the membrane of the virus particular. There are 16 known HA subtypes and 9 NA subtypes, and different influenza strains are named based on the number of the strain's HA and NA subtypes. Based on comparisons of amino acid sequence identity and of crystal structures, the HA subtypes have been divided into two main groups and four smaller clades. The different HA subtypes do not necessarily share strong amino acid sequence identity, but the overall 3D structures of the different HA subtypes are similar to one another, with several subtle differences that can be used for classification purposes. For example, the particular orientation of the membrane-distal subdomains in relation to a central α-helix is one structural characteristic commonly used to determine HA subtype (Russell et al., 2004, Virology, 325:287; incorporated herein by reference).

[0133] HA exists in the membrane as a homotrimer of one of 16 subtypes, termed H1-H16. Only three of these subtypes (H1, H2, and H3) have thus far become adapted for human infection. One reported characteristic of HAs that have adapted to infect humans (e.g., of HAs from the pandemic H1N1 (1918) and H3N2 (1967-68) influenza subtypes) is their ability to preferentially bind to α2-6 sialylated glycans in comparison with their avian progenitors that preferentially bind to α2-3 sialylated glycans (Skehel & Wiley, 2000, Annu Rev Biochem, 69:531; Rogers, & Paulson, 1983, Virology, 127:361; Rogers et al., 1983, Nature, 304:76; Sauter et al., 1992, Biochemistry, 31:9609; Connor et al., 1994, Virology, 205:17; Tumpey et al., 2005, Science, 310:77; all of which are incorporated herein by reference). The present invention, however, encompasses the recognition that ability to infect human hosts correlates less with binding to glycans of a particular linkage, and more with binding to glycans of a particular topology. Thus, the present invention demonstrates that HAs that mediate infection of humans bind to umbrella topology glycans, often showing preference for umbrella topology glycans over cone topology glycans (even though cone-topology glycans may be α2-6 sialylated glycans).

[0134] Several crystal structures of HAs from H1 (human and swine), H3 (avian) and H5 (avian) subtypes bound to sialylated oligosaccharides (of both α2-3 and α2-6 linkages) are available and provide molecular insights into the specific amino acids that are involved in distinct interactions of the HAs with these glycans (Eisen et al., 1997, Virology, 232:19; Ha et al., 2001, Proc Natl Acad Sci USA, 98:11181; Ha et al., 2003, Virology, 309:209; Gamblin et al., 2004, Science, 303:1838; Stevens et al., 2004, Science, 303:1866; Russell et al., 2006, Glycoconj J 23:85; Stevens et al., 2006, Science, 312:404; all of which are incorporated herein by reference).

[0135] For example, the crystal structures of H5 (A/duck/Singapore/3/97) alone or bound to an α2-3 or an α2-6 sialylated oligosaccharide identifies certain amino acids that interact directly with bound glycans, and also amino acids that are one or more degree of separation removed (Stevens et al., 2001, Proc Natl Acad Sci USA 98:11181; incorporated herein by reference). In some cases, conformation of these residues is different in bound versus unbound states. For instance, Glu190, Lys193, and Gln226 all participate in direct-binding interactions and have different conformations in the bound versus the unbound state. The conformation of Asn186, which is proximal to Glu190, is also significantly different in the bound versus the unbound state.

### Binding Agents

[0136] As noted above, the present invention encompasses the finding that binding to umbrella topology glycans correlates with ability to mediate infection of particular hosts, including for example, humans. Accordingly, the present invention provides binding agents (e.g., HA polypeptides, HA polypeptide variants, LSBAs, UTBAs, UTSBAs, etc.) that bind to umbrella glycans (and/or to umbrella topology glycan mimics). In some embodiments, binding agents in accordance with the invention bind to umbrella glycans (and/or to umbrella topology glycan mimics) with high affinity. In some embodiments, binding agents in accordance with the invention bind to a plurality of different umbrella topology glycans, often with high affinity and/or specificity.

[0137] In some embodiments, binding agents in accordance with the invention bind to umbrella topology glycans (e.g., long α2-6 sialylated glycans such as, for example, Neu5Acα2-6Galβ1-4GlcNAcβ1-3Galβ1-4GlcNAc-) with high affinity. For example, in some embodiments, binding agents in accordance with the invention bind to umbrella topology glycans with an affinity comparable to that observed for a wild type HA that mediates infection of a humans (e.g., H1N1 HA or H3N2 HA). In some embodiments, binding agents in accordance with the invention bind to umbrella glycans with an affinity that is at least 25%, at least 30%, at least 35%, at least 40%, at least 45%, at least 50%, at least 55%, at least 60%, at least 65%, at least 70%, at least 75%, at least 80%, at least 85%, at least 90%, at least 95%, at least 96%, at least 97%, at least 98%, at least 99%, or 100% of that observed under comparable conditions for a wild type HA that mediates infection of humans. In some embodiments, binding agents in accordance with the invention bind to umbrella glycans with an affinity that is greater than that observed under comparable conditions for a wild type HA that mediates infection of humans.

[0138] In some embodiments, binding affinity of binding agents in accordance with the invention is assessed over a range of concentrations. Such a strategy provides significantly more information, particularly in multivalent binding assays, than do single-concentration analyses. In some embodiments, for example, binding affinities of binding agents in accordance with the invention are assessed over concentrations ranging over at least 2, at least 3, at least 4, at least 5, at least 6, at least 7, at least 8, at least 9, at least 10 or more fold.

[0139] In some embodiments, binding agents in accordance with the invention show high affinity if they show a saturating signal in a multivalent glycan array binding assay such as those described herein. In some embodiments, binding agents in accordance with the invention show high affinity if they show a signal above about 400000 or more (e.g., above about 500000, about 600000, about 700000, about 800000, etc.) in such studies. In some embodiments, binding agents as described herein show saturating binding to umbrella glycans over a concentration range of at least 2 fold, at least 3 fold, at least 4 fold, at least 5 fold or more, and in some embodiments over a concentration range as large as 10 fold or more.

[0140] Furthermore, in some embodiments, binding agents in accordance with the invention bind to umbrella topology glycans (and/or to umbrella topology glycan mimics) more strongly than they bind to cone topology glycans. In some embodiments, binding agents in accordance with the invention show a relative affinity for umbrella glycans vs. cone glycans that is about 10, about 9, about 8, about 7, about 6, about 5, about 4, about 3, or about 2.

[0141] In some embodiments, binding agents in accordance with the invention bind to α2-6 sialylated glycans; in some embodiments, binding agents in accordance with the invention bind preferentially to α2-6 sialylated glycans. In some embodiments, binding agents in accordance with the invention bind to a plurality of different α2-6 sialylated glycans. In some embodiments, binding agents in accordance with the invention are not able to bind to α2-3 sialylated glycans, and in some embodiments binding agents in accordance with the invention are able to bind to α2-3 sialylated glycans.

[0142] In some embodiments, binding agents in accordance with the invention bind to receptors found on human upper respiratory epithelial cells. In some embodiments, binding agents in accordance with the invention bind to HA receptors in the bronchus and/or trachea. In some embodiments, binding agents in accordance with the invention are not able to bind receptors in the deep lung, and in some embodiments, binding agents in accordance with the invention are able to bind receptors in the deep lung.

[0143] In some embodiments, binding agents in accordance with the invention bind to at least about 10%, about 15%, about 20%, about 25%, about 30% about 35%, about 40%, about 45%, about 50%, about 55%, about 60%, about 65%, about 70%, about 75%, about 80%, about 85%, about 90%, about 95%, or more of the glycans found on HA receptors in human upper respiratory tract tissues (e.g., epithelial cells).

[0144] In some embodiments, binding agents in accordance with the invention bind to one or more of the glycans illustrated in FIG. 9. In some embodiments, binding agents in accordance with the invention bind to multiple glycans illustrated in FIG. 9. In some embodiments, binding agents in accordance with the invention bind with high affinity and/or specificity to glycans illustrated in FIG. 9. In some embodiments, binding agents in accordance with the invention bind to glycans illustrated in FIG. 9 preferentially as compared with their binding to glycans illustrated in FIG. 8. In some embodiments, binding agents in accordance with the invention bind to an oligosaccharide of the following form:

[0145] Neu5Acα2-6Sug1-Sug2-Sug3

[0146] where:
[0147] 1. Neu5Acα2-6 is always or almost always at the non-reducing end;
[0148] 2. Sug1:
   [0149] a. is a hexose (frequently Gal or Glc) or hexosamine (GlcNAc or GalNAc) in α or β configuration (frequently β- for N- and O-linked extension and α- in the case of GalNAcα- that is O-linked to glycoprotein);
   [0150] b. no sugars other than Neu5Acα2-6 should be attached to any of the non-reducing positions of Sug1 (except when Sug1 is GalNAcα- that is O-linked to the glycoprotein); and/or
   [0151] c. non-sugar moieties such as sulfate, phosphate, guanidium, amine, N-acetyl, etc. can be attached to non-reducing positions (typically 6 position) of Sug1 to improve contacts with HA;
[0152] 3. Sug2 and/or Sug3:
   [0153] a. hexose (frequently Gal or Glc) or hexosamine (GlcNAc or GalNAc) in α or β configuration (frequently β); and/or
   [0154] b. sugars (such as Fuc) or non-sugar moieties such as sulfate, phosphate, guanidium, amine, N-acetyl, etc. can be attached to non-reducing positions of Sug2, Sug3, and/or Sug4;
[0155] 4. Linkage between any two sugars in the oligosaccharide apart from Neu5Acα2-6 linkage can be 1-2, 1-3, 1-4, and/or 1-6 (typically 1-3 or 1-4); and/or
[0156] 5. Structure where Neu5Acα2-6 is linked GalNAcα that is O-linked to the glycoprotein and additional sugars are linked to the non-reducing end of GalNAcα for example
   [0157] i. Neu5Acα2-6(Neu5Acα2-3Galβ1-3)GalNAcα-
   [0158] ii. Neu5Acα2-6(Galβ1-3)GalNAcα-

[0159] The present invention provides binding agents with designated binding specificity, and also provides binding agents with designated binding characteristics with respect to umbrella glycans.

[0160] Certain particular binding agents provided by the present invention are described in more detail below.

[0161] HA Polypeptides

[0162] In some embodiments, binding agents in accordance with the invention are HA polypeptides. For example, the present invention provides isolated HA polypeptides with designated binding specificity, and also provides engineered HA polypeptides with designated binding characteristics with respect to umbrella glycans.

[0163] In some embodiments, provided HA polypeptides with designated binding characteristics are H1 polypeptides. In some embodiments, HA polypeptides in accordance with the invention with designated binding characteristics are H2 polypeptides. In some embodiments, HA polypeptides in accordance with the invention with designated binding characteristics are H3 polypeptides. In some embodiments, HA polypeptides in accordance with the invention with designated binding characteristics are H4 polypeptides. In some embodiments, HA polypeptides in accordance with the invention with designated binding characteristics are H5 polypeptides. In some embodiments, HA polypeptides in accordance with the invention with designated binding characteristics are H6 polypeptides. In some embodiments, HA polypeptides in accordance with the invention with designated binding characteristics are H7 polypeptides. In some embodiments, HA polypeptides in accordance with the invention with designated binding characteristics are H8 polypeptides. In some embodiments, HA polypeptides in accordance with the invention with designated binding characteristics are H9 polypeptides. In some embodiments, HA polypeptides in accordance with the invention with designated binding characteristics are H10 polypeptides. In some embodiments, HA polypeptides in accordance with the invention with designated binding characteristics are H11 polypeptides. In some embodiments, HA polypeptides in accordance with the invention with designated binding characteristics are H12 polypeptides. In some embodiments, HA polypeptides in accordance with the invention with designated binding characteristics are H13 polypeptides. In some embodiments, HA polypeptides in accordance with the invention with designated binding characteristics are H14 polypeptides. In some embodiments, HA polypeptides in accordance with the invention with designated binding characteristics are H15 polypeptides. In some embodiments, HA polypeptides in accordance with the invention with designated binding characteristics are H16 polypeptides.

[0164] In some embodiments, HA polypeptides in accordance with the invention do not include the H1 protein from any of the strains: A/South Carolina/1/1918; A/Puerto Rico/8/1934; A/Taiwan/1/1986; A/Texas/36/1991; A/Beijing/262/1995; A/Johannesburg/92/1996; A/New Caledonia/20/1999; A/Solomon Islands/3/2006.

[0165] In some embodiments, HA polypeptides in accordance with the invention are not the H2 protein from any of the strains of the Asian flu epidemic of 1957-58). In some embodiments, HA polypeptides in accordance with the invention do not include the H2 protein from any of the strains: A/Japan/305+/1957; A/Singapore/1/1957; A/Taiwan/1/1964; A/Taiwan/1/1967.

[0166] In some embodiments, HA polypeptides in accordance with the invention do not include the H3 protein from any of the strains: A/Aichi/2/1968; A/Philippines/2/1982; A/Mississippi/1/1985; A/Leningrad/360/1986; A/Sichuan/2/1987; A/Shanghai/11/1987; A/Beijing/353/1989; A/Shandong/9/1993; A/Johannesburg/33/1994; A/Nanchang/813/1995; A/Sydney/5/1997; A/Moscow/10/1999; A/Panama/2007/1999; A/Wyoming/3/2003; A/Oklahoma/323/2003; A/California/7/2004; A/Wisconsin/65/2005.

[0167] Variant HA Polypeptides

[0168] In some embodiments, a provided HA polypeptide is a variant of a parent HA polypeptide in that its amino acid sequence is identical to that of the parent HA but for a small number of particular sequence alterations. In some embodiments, the parent HA is an HA polypeptide found in a natural isolate of an influenza virus (e.g., a wild type HA polypeptide).

[0169] In some embodiments, HA polypeptide variants in accordance with the invention have different glycan binding characteristics than their corresponding parent HA polypeptides. In some embodiments, HA variant polypeptides in accordance with the invention have greater affinity and/or specificity for umbrella glycans (e.g., as compared with for cone glycans) than do their cognate parent HA polypeptides. In some embodiments, such HA polypeptide variants are engineered variants.

[0170] In some embodiments, HA variant polypeptides in accordance with the invention have greater affinity and/or specificity for umbrella glycans as compared with their cognate parent HA polypeptides. In some embodiments, HA variant polypeptides in accordance with the invention have reduced affinity and/or specificity for cone topology glycans as compared with their cognate parent HA polypeptides. In some embodiments, HA variant polypeptides in accordance with the invention have greater affinity and/or specificity for umbrella glycans and reduced affinity and/or specificity for cone topology glycans as compared with their cognate parent HA polypeptides.

[0171] In some embodiments, HA variant polypeptides in accordance with the invention have greater affinity and/or specificity for α2-6 glycans as compared with their cognate parent HA polypeptides. In some embodiments, HA variant polypeptides in accordance with the invention have reduced affinity and/or specificity for α2-3 glycans as compared with their cognate parent HA polypeptides. In some embodiments, HA variant polypeptides in accordance with the invention have greater affinity and/or specificity for α2-6 and α2-3 glycans as compared with their cognate parent HA polypeptides. In some embodiments, HA variant polypeptides in accordance with the invention have greater affinity and/or specificity for α2-6 glycans and reduced affinity and/or specificity for α2-3 glycans as compared with their cognate parent HA polypeptides.

[0172] In some embodiments, HA variant polypeptides in accordance with the invention have greater affinity and/or specificity for umbrella topology glycans and α2-3 glycans as compared with their cognate parent HA polypeptides. In some embodiments, HA variant polypeptides in accordance with the invention have greater affinity and/or specificity for umbrella topology glycans and reduced affinity and/or specificity for α2-3 glycans as compared with their cognate parent HA polypeptides.

[0173] In some embodiments, HA variant polypeptides in accordance with the invention have greater affinity and/or specificity for α2-6 glycans and cone topology glycans as compared with their cognate parent HA polypeptides. In some embodiments, HA variant polypeptides in accordance with the invention have greater affinity and/or specificity for α2-6 glycans and reduced affinity and/or specificity for cone topology glycans as compared with their cognate parent HA polypeptides.

[0174] In some embodiments, HA polypeptide variants in accordance with the invention contain one or more sequence alterations that are consistent with HA sequences found in a different HA subtype. To give but one particular example, in some embodiments, an H5 HA polypeptide variant in accordance with the invention contains one or more sequence alterations which make the H5 HA polypeptide variant more closely resemble an H2 HA polypeptide. To give another particular example, in some embodiments, an H5 HA polypeptide variant in accordance with the invention contains one or more sequence alterations which make the H5 HA polypeptide variant more closely resemble an H1 HA polypeptide.

[0175] The present invention particularly encompasses the recognition that HA polypeptide variants (e.g., H1, H2, H3, H4, H5, H6, H7, H8, H9, H10, H11, H12, H13, H14, H15, or H16 HA polypeptide variants) with altered glycosylation can show 2-fold, 3-fold, 4-fold, 5-fold, 10-fold, 20-fold, 50-fold, 100-fold, 1000-fold, 10,000-fold, or greater affinity to human HA receptors as compared with a reference HA polypeptide. The present invention also particularly encompasses the recognition that HA polypeptide variants (e.g., H1, H2, H3, H4, H5, H6, H7, H8, H9, H10, H11, H12, H13, H14, H15, or H16 HA polypeptide variants) with alterations in the HA loop region, can show 2-fold, 3-fold, 4-fold, 5-fold, 10-fold, 20-fold, 50-fold, 100-fold, 1000-fold, 10,000-fold, or greater affinity to human HA receptors as compared with a reference HA polypeptide (e.g., an HA polypeptide of any of SEQ ID NOs: 43-55).

[0176] The present invention particularly encompasses the recognition that HA polypeptide variants (e.g., H1, H2, H3, H4, H5, H6, H7, H8, H9, H10, H11, H12, H13, H14, H15, or H16 HA polypeptide variants) with altered glycosylation can show 2-fold, 3-fold, 4-fold, 5-fold, 10-fold, 20-fold, 50-fold, 100-fold, 1000-fold, 10,000-fold, or greater specificity for human HA receptors as compared with a reference HA polypeptide. The present invention also particularly encompasses the recognition that HA polypeptide variants (e.g., H1, H2, H3, H4, H5, H6, H7, H8, H9, H10, H11, H12, H13, H14, H15, or H16 HA polypeptide variants) with alterations in the HA loop region, can show 2-fold, 3-fold, 4-fold, 5-fold, 10-fold, 20-fold, 50-fold, 100-fold, 1000-fold, 10,000-fold, or greater specificity for human HA receptors as compared with a reference HA polypeptide (e.g., an HA polypeptide of any of SEQ ID NOs: 43-55).

[0177] In some embodiments, the reference HA polypeptide is the HA from A/South Carolina/1/18 (H1N1) (SEQ ID NO: 43). In some embodiments, the reference HA polypeptide is the HA from A/Brisbane/59/07 (SEQ ID NO: 44). In some embodiments, the reference HA polypeptide is the HA from A/California/04/09 (SEQ ID NO: 45). In some embodiments, the reference HA polypeptide is the HA from A/Albany/6/58 (H2N2) (SEQ ID NO: 46). In some embodiments, the reference HA polypeptide is the HA from A/Aichi/1/68 (SEQ ID NO: 47). In some embodiments, the reference HA polypeptide is the HA from A/Moscow/10/99 (SEQ ID NO: 48). In some embodiments, the reference HA polypeptide is the HA from A/Perth/16/09 (SEQ ID NO: 49). In some embodiments, the reference HA polypeptide is the HA from A/Vietnam/1203/04 (SEQ ID NO: 50). In some embodiments, the reference HA polypeptide is the HA from A/Egypt/2786-NAMRU3/06 (SEQ ID NO: 51). In some embodiments, the reference HA polypeptide is the HA from A/New York/107/03 (SEQ ID NO: 52). In some embodiments, the reference HA polypeptide is the HA from A/Hongkong/486/97 (SEQ ID NO: 53). In some embodiments, the reference HA polypeptide is the HA from A/Hongkong/213/03 (SEQ ID NO: 54). In some embodiments, the reference HA polypeptide is the HA from A/Indonesia/5/05 (SEQ ID NO: 55).

[0178] In some embodiments, HA polypeptide variants with altered glycan binding characteristics have one or more sequence alternations in residues within or affecting the glycan binding site. In some embodiments, such substitutions are of amino acids that interact directly with bound glycan; in some embodiments, such substitutions are of amino acids that are one degree of separation removed from those that interact with bound glycan, in that the one degree of separation removed—amino acids either (1) interact with the direct-binding amino acids; (2) otherwise affect the ability of the direct-binding amino acids to interact with glycan, but do not interact directly with glycan themselves; or (3) otherwise affect the ability of the direct-binding amino acids to interact with glycan, and also interact directly with glycan themselves. HA polypeptide variants in accordance with the invention contain substitutions of one or more direct-binding amino acids, one or more first degree of separation—amino acids, one or more second degree of separation—amino acids, or any combination of these. In some embodiments, HA polypeptide variants in accordance with the invention may contain substitutions of one or more amino acids with even higher degrees of separation.

[0179] In some embodiments, HA polypeptide variants with altered glycan binding characteristics have sequence alterations in residues that make contact with sugars beyond Neu5Ac and Gal (see, for example, FIG. 7).

[0180] In some embodiments, HA polypeptide variants have at least one amino acid substitution, as compared with a wild type parent HA. In some embodiments, HA polypeptide variants in accordance with the invention have at least two, three, four, five or more amino acid substitutions as compared with a cognate wild type parent HA; in some embodiments HA polypeptide variants in accordance with the invention have two, three, or four amino acid substitutions. In some embodiments, all such amino acid substitutions are located within the glycan binding site.

[0181] In some embodiments, HA polypeptide variants in accordance with the invention contain one or more amino acid substitutions as described in any of U.S. Patent Publication Number 2009/0269342 and 2010/0004195, and in U.S. patent application Ser. No. 12/829,931, filed Jul. 2, 2010, entitled “COMPOSITIONS AND METHODS FOR DIAGNOSING AND/OR TREATING INFLUENZA INFECTION” (all of which are incorporated herein by reference).

[0182] In some embodiments, HA polypeptide variants have sequence substitutions at positions corresponding to one or more of residues 95, 98, 128, 130, 131, 132, 133, 135, 136, 137, 138, 145, 153, 155, 156, 158, 159, 160, 183, 186, 187, 188, 189, 190, 192, 193, 194, 195, 196, 219, 221, 222, 224, 225, 226, 227, and 228. In some embodiments, HA polypeptide variants, particularly H5 polypeptide variants, have one or more amino acid substitutions relative to a wild type parent HA (e.g., H5) at residues selected from the group consisting of residues 95, 98, 128, 130, 131, 132, 133, 135, 136, 137, 138, 145, 153, 155, 156, 158, 159, 160, 183, 186, 187, 188, 189, 190, 192, 193, 194, 195, 196, 219, 221, 222, 224, 225, 226, 227, and 228. In some embodiments, HA polypeptide variants, particularly H5 polypeptide variants, have one or more amino acid substitutions relative to a wild type parent HA (e.g., H5) at any 1, 2, 3, 4, 5, 6, 7, 8, 9, 10, 11, 12, 13, 14, 15, 16, 17, 18, 19, 20, 21, 22, 23, 24, 25, 26, 27, 28, 29, 30, 31, 32, 33, 34, 35, 36, or 37 residues selected from the group consisting of residues 95, 98, 128, 130, 131, 132, 133, 135, 136, 137, 138, 145, 153, 155, 156, 158, 159, 160, 183, 186, 187, 188, 189, 190, 192, 193, 194, 195, 196, 219, 221, 222, 224, 225, 226, 227, and 228.

[0183] In some embodiments, HA polypeptide variants (e.g., H5 HA polypeptide variants) have sequence substitutions that reduce or abolish glycosylation at a site corresponding to amino acid position 158. In some embodiments, HA polypeptide variants (e.g., H5 HA polypeptide variants) have sequence substitutions that affect and/or alter the identity and/or structure of the glycan linked to a site corresponding to amino acid position 158. In some embodiments, such a sequence substitution is a mutation at a site corresponding to position 158, e.g., Asn158Xaa, wherein Xaa is any amino acid other than Asn. In some embodiments, such a sequence substitution is a mutation at a site corresponding to position 160, e.g., Thr160Xaa, wherein Xaa is any amino acid other than Asn. In some embodiments, such a sequence substitution comprises the mutation Thr160Ala. In some embodiments, a sequence substitution that reduces, abolishes, affects, or alters glycosylation at a site corresponding to amino acid position 158 can make a non-H2 HA polypeptide (e.g., an H5 HA polypeptide) more closely resemble (e.g., both structurally and functionally) an H2 HA polypeptide. In some embodiments, a mutation at a site corresponding to position 160 (e.g., Thr160Xaa, such as Thr160Ala) can make a non-H2 HA polypeptide (e.g., an H5 HA polypeptide) more closely resemble (e.g., both structurally and functionally) an H2 HA polypeptide.

[0184] In some embodiments, HA polypeptide variants (e.g., H5 HA polypeptide variants) have sequence substitutions relative to a wild type parent HA (e.g., H5 HA) at positions corresponding to one or more of residues 226, 228, and 160. In some embodiments, HA polypeptide variants (e.g., H5 HA polypeptide variants) have sequence substitutions relative to a wild type parent HA (e.g., H5 HA) at positions corresponding to residues 226, 228, and 160. In some embodiments, HA polypeptide variants (e.g., H5 HA polypeptide variants) have sequence substitutions relative to a wild type parent HA (e.g., H5 HA) at positions corresponding to residues 226 and 160. In some embodiments, HA polypeptide variants (e.g., H5 HA polypeptide variants) have sequence substitutions relative to a wild type parent HA (e.g., H5 HA) at positions corresponding to residues 228 and 160. In some embodiments, HA polypeptide variants (e.g., H5 HA polypeptide variants) have sequence substitutions relative to a wild type parent HA (e.g., H5 HA) at positions corresponding to residues 226 and 228.

[0185] In some embodiments, HA polypeptide variants (e.g., H5 HA polypeptide variants) have sequence substitutions relative to a wild type parent HA (e.g., H5 HA) at positions corresponding to one or more of residues 226, 228, and 158. In some embodiments, HA polypeptide variants (e.g., H5 HA polypeptide variants) have sequence substitutions relative to a wild type parent HA (e.g., H5 HA) at positions corresponding to residues 226, 228, and 158. In some embodiments, HA polypeptide variants (e.g., H5 HA polypeptide variants) have sequence substitutions relative to a wild type parent HA (e.g., H5 HA) at positions corresponding to residues 226 and 158. In some embodiments, HA polypeptide variants (e.g., H5 HA polypeptide variants) have sequence substitutions relative to a wild type parent HA (e.g., H5 HA) at positions corresponding to residues 228 and 158. In some embodiments, HA polypeptide variants (e.g., H5 HA polypeptide variants) have sequence substitutions relative to a wild type parent HA (e.g., H5 HA) at positions corresponding to residues 226 and 228.

[0186] In some embodiments, HA polypeptide variants (e.g., H5 HA polypeptide variants) have sequence substitutions that include a deletion in one or more of the loop regions of an HA polypeptide. In some embodiments, HA polypeptide variants (e.g., H5 HA polypeptide variants) have sequence substitutions that include a deletion at a site corresponding to the 128-137 loop region of an HA polypeptide. In some embodiments, HA polypeptide variants (e.g., H5 HA polypeptide variants) have sequence substitutions that include a deletion at one or more of amino acid positions corresponding to residues 128, 129, 130, 131, 132, 133, 134, 135, 136, and/or 137 of an HA polypeptide. In some embodiments, HA polypeptide variants (e.g., H5 HA polypeptide variants) have sequence substitutions that include a deletion at a site corresponding to the 128-134 loop region of an HA polypeptide. In some embodiments, HA polypeptide variants (e.g., H5 HA polypeptide variants) have sequence substitutions that include a deletion at one or more of amino acid positions corresponding to residues 128, 129, 130, 131, 132, 133, and/or 134 of an HA polypeptide. In some embodiments, HA polypeptide variants (e.g., H5 HA polypeptide variants) have sequence substitutions that include a deletion of an amino acid corresponding to residue 130. In some embodiments, such loop region substitutions can make a non-H2 HA polypeptide (e.g., an H5 HA polypeptide) more closely resemble (e.g., both structurally and functionally) an H2 HA polypeptide. In some embodiments, a deletion of an amino acid corresponding to residue 130 can make a non-H2 HA polypeptide (e.g., an H5 HA polypeptide) more closely resemble (e.g., both structurally and functionally) an H2 HA polypeptide.

[0187] In some embodiments, HA polypeptide variants (e.g., H5 HA polypeptide variants) have sequence substitutions relative to a wild type parent HA (e.g., H5 HA) at positions corresponding to one or more of residues 131, 132, 133, 135, 137, 155, 188, 192, 193, 221, 226, 227, 228, and 130. In some embodiments, HA polypeptide variants (e.g., H5 HA polypeptide variants) have sequence substitutions relative to a wild type parent HA (e.g., H5 HA) at positions corresponding to any 1, 2, 3, 4, 5, 6, 7, 8, 9, 10, 11, 12, 13, or 14 of residues 131, 132, 133, 135, 137, 155, 188, 192, 193, 221, 226, 227, 228, and 130. In some embodiments, HA polypeptide variants (e.g., H5 HA polypeptide variants) have sequence substitutions relative to a wild type parent HA (e.g., H5 HA) at positions corresponding to (1) 130, and (2) one or more of residues 131, 132, 133, 135, 137, 155, 188, 192, 193, 221, 226, 227, and 228. In some embodiments, HA polypeptide variants (e.g., H5 HA polypeptide variants) have sequence substitutions relative to a wild type parent HA (e.g., H5 HA) at positions corresponding to (1) 130, and (2) any 1, 2, 3, 4, 5, 6, 7, 8, 9, 10, 11, 12, or 13 of residues 131, 132, 133, 135, 137, 155, 188, 192, 193, 221, 226, 227, and 228.

[0188] In some embodiments, HA polypeptide variants (e.g., H5 HA polypeptide variants) have sequence substitutions relative to a wild type parent HA (e.g., H5 HA) at positions corresponding to one or more of residues 131, 132, 135, 188, 192, 221, and 130. In some embodiments, HA polypeptide variants (e.g., H5 HA polypeptide variants) have sequence substitutions relative to a wild type parent HA (e.g., H5 HA) at positions corresponding to any 1, 2, 3, 4, 5, 6, or 7 of residues 131, 132, 135, 188, 192, 221, and 130. In some embodiments, HA polypeptide variants (e.g., H5 HA polypeptide variants) have sequence substitutions relative to a wild type parent HA (e.g., H5 HA) at positions corresponding to (1) 130, and (2) one or more of residues 131, 132, 135, 188, 192, and 221. In some embodiments, HA polypeptide variants (e.g., H5 HA polypeptide variants) have sequence substitutions relative to a wild type parent HA (e.g., H5 HA) at positions corresponding to (1) 130, and (2) any 1, 2, 3, 4, 5, or 6 of residues 131, 132, 135, 188, 192, and 221.

[0189] In some embodiments, HA polypeptide variants (e.g., H5 HA polypeptide variants) have sequence substitutions relative to a wild type parent HA (e.g., H5 HA) at positions corresponding to one or more of residues 133, 137, 155, 193, 226, 227, 228, and 130. In some embodiments, HA polypeptide variants (e.g., H5 HA polypeptide variants) have sequence substitutions relative to a wild type parent HA (e.g., H5 HA) at positions corresponding to any 1, 2, 3, 4, 5, 6, 7, or of residues 133, 137, 155, 193, 226, 227, 228, and 130. In some embodiments, HA polypeptide variants (e.g., H5 HA polypeptide variants) have sequence substitutions relative to a wild type parent HA (e.g., H5 HA) at positions corresponding to (1) 130, and (2) one or more of residues 133, 137, 155, 193, 226, 227, and 228. In some embodiments, HA polypeptide variants (e.g., H5 HA polypeptide variants) have sequence substitutions relative to a wild type parent HA (e.g., H5 HA) at positions corresponding to (1) 130, and (2) any 1, 2, 3, 4, 5, 6, or 7 of residues 133, 137, 155, 193, 226, 227, and 228.

[0190] In some embodiments, HA polypeptide variants (e.g., H5 HA polypeptide variants) have sequence substitutions relative to a wild type parent HA (e.g., H5 HA) at positions corresponding to one or more of residues 130, 192, and 193. In some embodiments, HA polypeptide variants (e.g., H5 HA polypeptide variants) have sequence substitutions relative to a wild type parent HA (e.g., H5 HA) at positions corresponding to any 1, 2, or 3 of residues 130, 192, 193. In some embodiments, HA polypeptide variants (e.g., H5 HA polypeptide variants) have sequence substitutions relative to a wild type parent HA (e.g., H5 HA) at positions corresponding to (1) 130, and (2) one or both of residues 192 and 193.

[0191] In some embodiments, HA polypeptide variants (e.g., H5 HA polypeptide variants) have sequence substitutions relative to a wild type parent HA (e.g., H5 HA) at positions corresponding to one or more of residues 131, 132, 133, 135, 137, 155, 158, 160, 188, 192, 193, 221, 226, 227, 228, and 130. In some embodiments, HA polypeptide variants (e.g., H5 HA polypeptide variants) have sequence substitutions relative to a wild type parent HA (e.g., H5 HA) at positions corresponding to any 1, 2, 3, 4, 5, 6, 7, 8, 9, 10, 11, 12, 13, 14, 15, or 16 of residues 131, 132, 133, 135, 137, 155, 158, 160, 188, 192, 193, 221, 226, 227, 228, and 130. In some embodiments, HA polypeptide variants (e.g., H5 HA polypeptide variants) have sequence substitutions relative to a wild type parent HA (e.g., H5 HA) at positions corresponding to (1) 130, and (2) one or more of residues 131, 132, 133, 135, 137, 155, 158, 160, 188, 192, 193, 221, 226, 227, and 228. In some embodiments, HA polypeptide variants (e.g., H5 HA polypeptide variants) have sequence substitutions relative to a wild type parent HA (e.g., H5 HA) at positions corresponding to (1) 130, and (2) any 1, 2, 3, 4, 5, 6, 7, 8, 9, 10, 11, 12, 13, 14, or 15 of residues 131, 132, 133, 135, 137, 155, 158, 160, 188, 192, 193, 221, 226, 227, and 228.

[0192] In some embodiments, HA polypeptide variants (e.g., H5 HA polypeptide variants) have sequence substitutions relative to a wild type parent HA (e.g., H5 HA) at positions corresponding to one or more of residues 137, 188, 192, 193, 226, 228, and 130. In some embodiments, HA polypeptide variants (e.g., H5 HA polypeptide variants) have sequence substitutions relative to a wild type parent HA (e.g., H5 HA) at positions corresponding to any 1, 2, 3, 4, 5, 6, or 7 of residues 137, 188, 192, 193, 226, 228, and 130. In some embodiments, HA polypeptide variants (e.g., H5 HA polypeptide variants) have sequence substitutions relative to a wild type parent HA (e.g., H5 HA) at positions corresponding to (1) 130, and (2) one or more of residues 137, 188, 192, 193, 226, and 228. In some embodiments, HA polypeptide variants (e.g., H5 HA polypeptide variants) have sequence substitutions relative to a wild type parent HA (e.g., H5 HA) at positions corresponding to (1) 130, and (2) any 1, 2, 3, 4, 5, or 6 of residues 137, 188, 192, 193, 226, and 228.

[0193] In some embodiments, HA polypeptide variants (e.g., H5 HA polypeptide variants) have sequence substitutions relative to a wild type parent HA (e.g., H5 HA) at positions corresponding to one or more of residues 137, 188, 192, 193, 226, 227, 228, 131, 132, 133, and 130. In some embodiments, HA polypeptide variants (e.g., H5 HA polypeptide variants) have sequence substitutions relative to a wild type parent HA (e.g., H5 HA) at positions corresponding to any 1, 2, 3, 4, 5, 6, 7, 8, 9, 10, or 11 of residues 137, 188, 192, 193, 226, 227, 228, 131, 132, 133, and 130. In some embodiments, HA polypeptide variants (e.g., H5 HA polypeptide variants) have sequence substitutions relative to a wild type parent HA (e.g., H5 HA) at positions corresponding to (1) 130, and (2) one or more of residues 137, 188, 192, 193, 226, 227, 228, 131, 132, and 133. In some embodiments, HA polypeptide variants (e.g., H5 HA polypeptide variants) have sequence substitutions relative to a wild type parent HA (e.g., H5 HA) at positions corresponding to (1) 130, and (2) any 1, 2, 3, 4, 5, 6, 7, 8, 9, or 10 of residues 137, 188, 192, 193, 226, 227, 228, 131, 132, and 133.

[0194] In some embodiments, HA polypeptide variants (e.g., H5 HA polypeptide variants) have sequence substitutions relative to a wild type parent HA (e.g., H5 HA) at positions corresponding to one or more of residues 227, 131, 132, 133, and 130. In some embodiments, HA polypeptide variants (e.g., H5 HA polypeptide variants) have sequence substitutions relative to a wild type parent HA (e.g., H5 HA) at positions corresponding to any 1, 2, 3, 4, or 5 of residues 227, 131, 132, 133, and 130. In some embodiments, HA polypeptide variants (e.g., H5 HA polypeptide variants) have sequence substitutions relative to a wild type parent HA (e.g., H5 HA) at positions corresponding to (1) 130, and (2) one or more of residues 227, 131, 132, and 133. In some embodiments, HA polypeptide variants (e.g., H5 HA polypeptide variants) have sequence substitutions relative to a wild type parent HA (e.g., H5 HA) at positions corresponding to (1) 130, and (2) any 1, 2, 3, or 4 of residues 227, 131, 132, and 133.

[0195] In some embodiments, HA polypeptide variants (e.g., H5 HA polypeptide variants) have sequence substitutions relative to a wild type parent HA (e.g., H5 HA) at positions corresponding to one or more of residues 131, 133, 137, 155, 188, 192, 193, 226, 227, 228, and 130. In some embodiments, HA polypeptide variants (e.g., H5 HA polypeptide variants) have sequence substitutions relative to a wild type parent HA (e.g., H5 HA) at positions corresponding to any 1, 2, 3, 4, 5, 6, 7, 8, 9, 10, or 11 of residues 131, 133, 137, 155, 188, 192, 193, 226, 227, 228, and 130. In some embodiments, HA polypeptide variants (e.g., H5 HA polypeptide variants) have sequence substitutions relative to a wild type parent HA (e.g., H5 HA) at positions corresponding to (1) 130, and (2) one or more of residues 131, 133, 137, 155, 188, 192, 193, 226, 227, and 228. In some embodiments, HA polypeptide variants (e.g., H5 HA polypeptide variants) have sequence substitutions relative to a wild type parent HA (e.g., H5 HA) at positions corresponding to (1) 130, and (2) any 1, 2, 3, 4, 5, 6, 7, 8, 9, or 10 of residues 131, 133, 137, 155, 188, 192, 193, 226, 227, and 228.

[0196] In some embodiments, HA polypeptide variants (e.g., H5 HA polypeptide variants) have sequence substitutions relative to a wild type parent HA (e.g., H5 HA) at positions corresponding to one or more of residues 131, 133, 137, 155, 188, 192, 193, 226, 228, and 130. In some embodiments, HA polypeptide variants (e.g., H5 HA polypeptide variants) have sequence substitutions relative to a wild type parent HA (e.g., H5 HA) at positions corresponding to any 1, 2, 3, 4, 5, 6, 7, 8, 9, or 10 of residues 131, 133, 137, 155, 188, 192, 193, 226, 228, and 130. In some embodiments, HA polypeptide variants (e.g., H5 HA polypeptide variants) have sequence substitutions relative to a wild type parent HA (e.g., H5 HA) at positions corresponding to (1) 130, and (2) one or more of residues 131, 133, 137, 155, 188, 192, 193, 226, and 228. In some embodiments, HA polypeptide variants (e.g., H5 HA polypeptide variants) have sequence substitutions relative to a wild type parent HA (e.g., H5 HA) at positions corresponding to (1) 130, and (2) any 1, 2, 3, 4, 5, 6, 7, 8, or 9 of residues 131, 133, 137, 155, 188, 192, 193, 226, and 228.

[0197] In some embodiments, HA polypeptide variants (e.g., H5 HA polypeptide variants) have sequence substitutions relative to a wild type parent HA (e.g., H5 HA) at positions corresponding to one or more of residues 131, 133, 137, 155, 159, 160, 188, 192, 193, 226, 227, 228, and 130. In some embodiments, HA polypeptide variants (e.g., H5 HA polypeptide variants) have sequence substitutions relative to a wild type parent HA (e.g., H5 HA) at positions corresponding to any 1, 2, 3, 4, 5, 6, 7, 8, 9, 10, 11, 12, or 13 of residues 131, 133, 137, 155, 159, 160, 188, 192, 193, 226, 227, 228, and 130. In some embodiments, HA polypeptide variants (e.g., H5 HA polypeptide variants) have sequence substitutions relative to a wild type parent HA (e.g., H5 HA) at positions corresponding to (1) 130, and (2) one or more of residues 131, 133, 137, 155, 159, 160, 188, 192, 193, 226, 227, and 228. In some embodiments, HA polypeptide variants (e.g., H5 HA polypeptide variants) have sequence substitutions relative to a wild type parent HA (e.g., H5 HA) at positions corresponding to (1) 130, and (2) any 1, 2, 3, 4, 5, 6, 7, 8, 9, 10, 11, or 12 of residues 131, 133, 137, 155, 159, 160, 188, 192, 193, 226, 227, and 228.

[0198] In some embodiments, HA polypeptide variants (e.g., H5 HA polypeptide variants) have sequence substitutions relative to a wild type parent HA (e.g., H5 HA) at positions corresponding to one or more of residues 131, 133, 137, 155, 159, 160, 188, 192, 193, 226, 228, and 130. In some embodiments, HA polypeptide variants (e.g., H5 HA polypeptide variants) have sequence substitutions relative to a wild type parent HA (e.g., H5 HA) at positions corresponding to any 1, 2, 3, 4, 5, 6, 7, 8, 9, 10, 11, or 12 of residues 131, 133, 137, 155, 159, 160, 188, 192, 193, 226, 228, and 130. In some embodiments, HA polypeptide variants (e.g., H5 HA polypeptide variants) have sequence substitutions relative to a wild type parent HA (e.g., H5 HA) at positions corresponding to (1) 130, and (2) one or more of residues 131, 133, 137, 155, 159, 160, 188, 192, 193, 226, and 228. In some embodiments, HA polypeptide variants (e.g., H5 HA polypeptide variants) have sequence substitutions relative to a wild type parent HA (e.g., H5 HA) at positions corresponding to (1) 130, and (2) any 1, 2, 3, 4, 5, 6, 7, 8, 9, 10, or 11 of residues 131, 133, 137, 155, 159, 160, 188, 192, 193, 226, and 228.

[0199] In some embodiments, HA polypeptide variants (e.g., H5 HA polypeptide variants) have sequence substitutions relative to a wild type parent HA (e.g., H5 HA) at positions corresponding to one or more of residues 137, 188, 192, 193, 226, 228, 131, 132, 133, 221, 227, and 130. In some embodiments, HA polypeptide variants (e.g., H5 HA polypeptide variants) have sequence substitutions relative to a wild type parent HA (e.g., H5 HA) at positions corresponding to any 1, 2, 3, 4, 5, 6, 7, 8, 9, 10, 11, or 12 of residues 137, 188, 192, 193, 226, 228, 131, 132, 133, 221, 227, and 130. In some embodiments, HA polypeptide variants (e.g., H5 HA polypeptide variants) have sequence substitutions relative to a wild type parent HA (e.g., H5 HA) at positions corresponding to (1) 130, and (2) one or more of residues 137, 188, 192, 193, 226, 228, 131, 132, 133, 221, and 227. In some embodiments, HA polypeptide variants (e.g., H5 HA polypeptide variants) have sequence substitutions relative to a wild type parent HA (e.g., H5 HA) at positions corresponding to (1) 130, and (2) any 1, 2, 3, 4, 5, 6, 7, 8, 9, 10, or 11 of residues 137, 188, 192, 193, 226, 228, 131, 132, 133, 221, and 227.

[0200] In some embodiments, HA polypeptide variants (e.g., H5 HA polypeptide variants) have sequence substitutions relative to a wild type parent HA (e.g., H5 HA) at positions corresponding to one or more of residues 131, 132, 133, 221, 227, and 130. In some embodiments, HA polypeptide variants (e.g., H5 HA polypeptide variants) have sequence substitutions relative to a wild type parent HA (e.g., H5 HA) at positions corresponding to any 1, 2, 3, 4, 5, or 6 of residues 131, 132, 133, 221, 227, and 130. In some embodiments, HA polypeptide variants (e.g., H5 HA polypeptide variants) have sequence substitutions relative to a wild type parent HA (e.g., H5 HA) at positions corresponding to (1) 130, and (2) one or more of residues 131, 132, 133, 221, and 227. In some embodiments, HA polypeptide variants (e.g., H5 HA polypeptide variants) have sequence substitutions relative to a wild type parent HA (e.g., H5 HA) at positions corresponding to (1) 130, and (2) any 1, 2, 3, 4, or 5 of residues 131, 132, 133, 221, and 227.

[0201] In some embodiments, an HA polypeptide variant, and particularly an H5 polypeptide variant, has one or more amino acid substitutions relative to a wild type parent HA at residues selected from amino acids located in the region of the receptor that directly binds to the glycan, including but not limited to residues 98, 136, 153, 155, 183, and 194. In some embodiments, an HA polypeptide variant in accordance with the invention, and particularly an H5 polypeptide variant, has one or more amino acid substitutions relative to a wild type parent HA at residues selected from amino acids located adjacent to the region of the receptor that directly binds the glycan, including but not limited to (a) residues 98 and 195, (b) residues 98, 138, 186, 187, 195, and 228), or (c) residues 138, 186, 187, and 228.

[0202] In some embodiments, an HA polypeptide variant in accordance with the invention, and particularly an H5 variant has one or more of the following amino acid substitutions: Ser132Thr, Ala133Thr, Ser133Thr, Ser137Ala, Ser137Arg, Ile155Thr, Lys156Glu, Asn158Xaa (wherein Xaa=any amino acid besides Asn), Thr160Ala, Asn186Pro, Asp187Ser, Asp187Thr, Ala188Glu, Ala188Asp, Ala189Gln, Ala189Lys, Ala189Thr, Glu190Asp, Glu190Thr, Thr192Arg/Lys, Lys193Arg, Lys193Asn, Lys193His, Lys193Ser, Lys/Arg193Thr/Ala/Met/Val, Ser221Pro, Gly225Asp, Gln226Ile, Gln226Leu, Gln226Val, Ser227Ala, Gly228Ser.

[0203] In some embodiments, an HA polypeptide variant (e.g., an H5 HA polypeptide variant) in accordance with the invention has an amino acid substitution at a position corresponding to residue 192, which switches the charge at that position. In some embodiments, an HA polypeptide variant (e.g., an H5 HA polypeptide variant) in accordance with the invention has an amino acid substitution at a position corresponding to residue 193, which switches the charge at that position. For example, in some embodiments, an HA polypeptide (e.g., an H5 HA polypeptide) in accordance with the invention has a Thr or a hydrophobic residue (e.g., Val or Ile) at a position corresponding to residue 192, and an HA polypeptide variant (e.g., an H5 HA polypeptide variant) (e.g., a human-adapted variant) has a hydrophilic residue at a position corresponding to residue 192. In some embodiments, an HA polypeptide variant (e.g., an H5 HA polypeptide variant) (e.g., a human-adapted variant) has a hydrophilic residue at a position corresponding to residue 192. To give another example, in some embodiments, an HA polypeptide (e.g., an H5 HA polypeptide) in accordance with the invention has a Thr or a hydrophobic residue (e.g., Val or Ile) at a position corresponding to residue 192, and an HA polypeptide variant (e.g., an H5 HA polypeptide variant) (e.g., a human-adapted variant) has a basic residue (e.g., Lys or Arg) at a position corresponding to residue 192. In some embodiments, an HA polypeptide variant (e.g., an H5 HA polypeptide variant) (e.g., a human-adapted variant) has a basic residue (e.g., Lys or Arg) at a position corresponding to residue 192. To give yet another example, in some embodiments, an HA polypeptide (e.g., an H5 HA polypeptide) in accordance with the invention has a basic residue (e.g., Lys or Arg) at a position corresponding to residue 193, and an HA polypeptide variant (e.g., an H5 HA polypeptide variant) (e.g., a human-adapted variant) has a neutral or acidic residue at a position corresponding to residue 193. In some embodiments, an HA polypeptide variant (e.g., an H5 HA polypeptide variant) (e.g., a human-adapted variant) has a neutral or acidic residue at a position corresponding to residue 193. In some embodiments, an HA polypeptide variant (e.g., an H5 HA polypeptide variant) (e.g., a human-adapted variant) has a Thr, Ala, Met, or Val at a position corresponding to residue 193.

[0204] In some embodiments, human adaptation of HA polypeptides (e.g., H5 HA polypeptides) is associated with the propert(ies) of the residue at position 188. In H5 HA, residue 188 is frequently Ala, which makes contacts with Thr or a hydrophobic residue at 192. In contrast, in H2 HA, residue 188 is frequently Glu or Asp, which makes contacts with Arg or Lys at 192. Hence, in some embodiments, an HA polypeptide variant (e.g., an H5 HA polypeptide variant) has a Glu at position 188. In some embodiments, an HA polypeptide variant (e.g., an H5 HA polypeptide variant) has an Asp at position 188. In some embodiments, an HA polypeptide variant (e.g., an H5 HA polypeptide variant) has an Ala188Glu substitution. In some embodiments, an HA polypeptide variant (e.g., an H5 HA polypeptide variant) has an Ala188Asp substitution.

[0205] In some embodiments, an HA polypeptide (e.g., an H5 HA polypeptide) has an Ala at a position corresponding to residue 188 and a Thr at a position corresponding to residue 192. In some embodiments, an HA polypeptide (e.g., an H5 HA polypeptide) has an Ala at a position corresponding to residue 188 and a hydrophobic residue at a position corresponding to residue 192. In some embodiments, an HA polypeptide variant (e.g., an H5 HA polypeptide variant) has a Glu at a position corresponding to residue 188 and an Arg at a position corresponding to residue 192. In some embodiments, an HA polypeptide variant (e.g., an H5 HA polypeptide variant) has an Asp at a position corresponding to residue 188 and an Arg at a position corresponding to residue 192. In some embodiments, an HA polypeptide variant (e.g., an H5 HA polypeptide variant) has a Glu at a position corresponding to residue 188 and a Lys at a position corresponding to residue 192. In some embodiments, an HA polypeptide variant (e.g., an H5 HA polypeptide variant) has an Asp at a position corresponding to residue 188 and a Lys at a position corresponding to residue 192.

[0206] In some embodiments, an HA polypeptide (e.g., an H5 HA polypeptide) has an Ala at a position corresponding to residue 188, a Thr at a position corresponding to residue 192, and a Lys at a position corresponding to residue 193. In some embodiments, an HA polypeptide (e.g., an H5 HA polypeptide) has an Ala at a position corresponding to residue 188, a hydrophobic residue at a position corresponding to residue 192, and a Lys at a position corresponding to residue 193. In some embodiments, an HA polypeptide (e.g., an H5 HA polypeptide) has an Ala at a position corresponding to residue 188, a Thr at a position corresponding to residue 192, and an Arg at a position corresponding to residue 193. In some embodiments, an HA polypeptide (e.g., an H5 HA polypeptide) has an Ala at a position corresponding to residue 188, a hydrophobic residue at a position corresponding to residue 192, and an Arg at a position corresponding to residue 193. In some embodiments, an HA polypeptide variant (e.g., an H5 HA polypeptide variant) has a Glu at a position corresponding to residue 188, an Arg at a position corresponding to residue 192, and a Thr at a position corresponding to residue 193. In some embodiments, an HA polypeptide variant (e.g., an H5 HA polypeptide variant) has an Asp at a position corresponding to residue 188, an Arg at a position corresponding to residue 192, and a Thr at a position corresponding to residue 193. In some embodiments, an HA polypeptide variant (e.g., an H5 HA polypeptide variant) has a Glu at a position corresponding to residue 188, a Lys at a position corresponding to residue 192, and a Thr at a position corresponding to residue 193. In some embodiments, an HA polypeptide variant (e.g., an H5 HA polypeptide variant) has an Asp at a position corresponding to residue 188, a Lys at a position corresponding to residue 192, and a Thr at a position corresponding to residue 193. In some embodiments, an HA polypeptide variant (e.g., an H5 HA polypeptide variant) has a Glu at a position corresponding to residue 188, an Arg at a position corresponding to residue 192, and a Thr, Ala, Met, or Val at a position corresponding to residue 193. In some embodiments, an HA polypeptide variant (e.g., an H5 HA polypeptide variant) has an Asp at a position corresponding to residue 188, an Arg at a position corresponding to residue 192, and a Thr, Ala, Met, or Val at a position corresponding to residue 193. In some embodiments, an HA polypeptide variant (e.g., an H5 HA polypeptide variant) has a Glu at a position corresponding to residue 188, a Lys at a position corresponding to residue 192, and a Thr, Ala, Met, or Val at a position corresponding to residue 193. In some embodiments, an HA polypeptide variant (e.g., an H5 HA polypeptide variant) has an Asp at a position corresponding to residue 188, a Lys at a position corresponding to residue 192, and a Thr, Ala, Met, or Val at a position corresponding to residue 193.

[0207] In some embodiments, an HA polypeptide (e.g., an H5 HA polypeptide) has an Ala at a position corresponding to residue 131. In some embodiments, an HA polypeptide variant (e.g., an H5 HA polypeptide variant) has a Thr at a position corresponding to residue 131.

[0208] In some embodiments, an HA polypeptide (e.g., an H5 HA polypeptide) has a Ser at a position corresponding to residue 132. In some embodiments, an HA polypeptide variant (e.g., an H5 HA polypeptide variant) has a Thr at a position corresponding to residue 132.

[0209] In some embodiments, an HA polypeptide (e.g., an H5 HA polypeptide) has a Ser at a position corresponding to residue 133. In some embodiments, an HA polypeptide variant (e.g., an H5 HA polypeptide variant) has a Thr at a position corresponding to residue 133.

[0210] In some embodiments, an HA polypeptide (e.g., an H5 HA polypeptide) includes Ala, Thr, and/or Ser at any position corresponding to residues 131, 132, and/or 133. In some embodiments, an HA polypeptide variant (e.g., an H5 HA polypeptide variant) includes Ala, Thr, and/or Ser at any position corresponding to residues 131, 132, and/or 133. In some embodiments, an HA polypeptide variant (e.g., an H5 HA polypeptide variant) includes Thr at all of positions corresponding to 131, 132, and 133.

[0211] In some embodiments, an HA polypeptide (e.g., an H5 HA polypeptide) has a Val at a position corresponding to residue 135. In some embodiments, an HA polypeptide variant (e.g., an H5 HA polypeptide variant) has any amino acid other than Val at a position corresponding to residue 135.

[0212] In some embodiments, an HA polypeptide (e.g., an H5 HA polypeptide) has a Ser at a position corresponding to residue 137. In some embodiments, an HA polypeptide variant (e.g., an H5 HA polypeptide variant) has an Arg at a position corresponding to residue 137.

[0213] In some embodiments, an HA polypeptide (e.g., an H5 HA polypeptide) has an Ile at a position corresponding to residue 155. In some embodiments, an HA polypeptide variant (e.g., an H5 HA polypeptide variant) has a Thr at a position corresponding to residue 155. In some embodiments, an HA polypeptide (e.g., an H5 HA polypeptide) includes a Thr at a position corresponding to residue 155. In some embodiments, an HA polypeptide variant (e.g., an H5 HA polypeptide variant) includes a Thr at a position corresponding to residue 155.

[0214] In some embodiments, an HA polypeptide (e.g., an H5 HA polypeptide) has a Ser at a position corresponding to residue 221. In some embodiments, an HA polypeptide variant (e.g., an H5 HA polypeptide variant) has a Pro at a position corresponding to residue 221.

[0215] In some embodiments, an HA polypeptide (e.g., an H5 HA polypeptide) includes a Ser at a position corresponding to residue 221. In some embodiments, an HA polypeptide variant (e.g., an H5 HA polypeptide variant) includes a Pro at a position corresponding to residue 221. Without wishing to be bound by any one particular theory, Pro221 might influence conformation of 220 loop which is involved with the RBS of H2 HA.

[0216] In some embodiments, an HA polypeptide (e.g., an H5 HA polypeptide) has a Gln at a position corresponding to residue 226. In some embodiments, an HA polypeptide variant (e.g., an H5 HA polypeptide variant) has a Leu at a position corresponding to residue 226.

[0217] In some embodiments, an HA polypeptide (e.g., an H5 HA polypeptide) has a Ser at a position corresponding to residue 227. In some embodiments, an HA polypeptide variant (e.g., an H5 HA polypeptide variant) has a Gly at a position corresponding to residue 227.

[0218] In some embodiments, an HA polypeptide (e.g., an H5 HA polypeptide) has a Gly at a position corresponding to residue 228. In some embodiments, an HA polypeptide variant (e.g., an H5 HA polypeptide variant) has a Ser at a position corresponding to residue 228.

[0219] In some embodiments, an HA polypeptide (e.g., an H5 HA polypeptide) includes Gln, Ser, and Gly residues at positions corresponding to residues 226, 227, and 228, respectively. In some embodiments, an HA polypeptide variant (e.g., an H5 HA polypeptide variant) includes a Leu, Gly, and Ser at positions corresponding to residues 226, 227, and 228, respectively.

[0220] In some embodiments, an HA polypeptide variant in accordance with the invention, and particularly an H5 variant has one or more of the following amino acids at the indicated positions (the numbering of these positions corresponds to the numbering of H3 HA):
[0221] Glu190Asp, Lys193Ser, Gly225Asp, Gln226Leu
[0222] Glu190Asp, Lys193Ser, Gln226Leu, Gly228Ser
[0223] Ala189Gln, Lys193Ser, Thr160Ala
[0224] Ala189Gln, Lys193Ser, Gln226Leu, Gly228Ser
[0225] Asp187Ser/Thr, Ala189Gln, Lys193Ser, Gln226Leu, Gly228Ser
[0226] Ala189Lys, Lys193Asn, Gln226Leu, Gly228Ser
[0227] Asp187Ser/Thr, Ala189Lys, Lys193Asn, Gln226Leu, Gly228Ser
[0228] Lys156Glu, Ala189Lys, Lys193Asn, Gln226Leu, Gly228Ser
[0229] Lys193His, Gln226Leu/Ile/Val, Gly228Ser
[0230] Lys193Arg, Gln226Leu/Ile/Val, Gly228Ser
[0231] Ala189Lys, Lys193Asn, Gly225Asp
[0232] Lys156Glu, Ala189Lys, Lys193Asn, Gly225Asp
[0233] Ser137Ala, Lys156Glu, Ala189Lys, Lys193Asn, Gly225Asp
[0234] Glu190Thr, Lys193Ser, Gly225Asp
[0235] Asp187Thr, Ala189Thr, Glu190Asp, Lys193Ser, Gly225Asp
[0236] Asn186Pro, Asp187Thr, Ala189Thr, Glu190Asp, Lys193Ser, Gly225Asp
[0237] Asn186Pro, Asp187Thr, Ala189Thr, Glu190Asp, Lys193Ser, Gly225Asp, Ser227Ala
[0238] Gln226Leu, Gly228Ser, Thr160Ala
[0239] Gln226Leu, Gly228Ser, Thr160Ala
[0240] Gly228Ser, Thr160Ala
[0241] Gln226Leu, Thr160Ala
[0242] Gln226Leu, Gly228Ser
[0243] Thr160Ala
[0244] Gln226Leu, Gly228Ser, Asn158Xaa (wherein Xaa=any amino acid besides Asn)
[0245] Gly228Ser, Asn158Xaa
[0246] Gln226Leu, Asn158Xaa
[0247] Gln226Leu, Gly228Ser
[0248] Asn158Xaa
[0249] Δ130 (wherein “Δ130” indicates a deletion at an amino acid corresponding to position 130) plus any possible combination of mutations at positions corresponding to residues 131, 132, 133, 135, 137, 155, 188, 192, 193, 221, 226, 227, and 228
[0250] Δ130 plus any possible combination of mutations at positions corresponding to residues 131, 132, 135, 188, 192, and 221
[0251] Δ130 plus any possible combination of mutations at positions corresponding to residues 133, 137, 155, 193, 226, 227, and 228
[0252] Δ130 plus any possible combination of mutations at positions corresponding to residues 131, 132, 133, 135, 137, 155, 158, 160, 188, 192, 193, 221, 226, 227, and 228
[0253] Δ130 plus any possible combination of mutations at positions corresponding to residues 131, 133, 137, 155, 188, 192, 193, 226, 227, and 228
[0254] Δ130 plus any possible combination of mutations at positions corresponding to residues 131, 133, 137, 155, 188, 192, 193, 226, and 228
[0255] Δ130 plus any possible combination of mutations at positions corresponding to residues 131, 133, 137, 155, 159, 160, 188, 192, 193, 226, 227, and 228
[0256] Δ130 plus any possible combination of mutations at positions corresponding to residues 131, 133, 137, 155, 159, 160, 188, 192, 193, 226, and 228
[0257] Δ130 plus any possible combination of mutations at positions corresponding to residues 137, 188, 192, 193, 226, 228, 131, 132, 133, 221, and 227
[0258] Δ130 plus any possible combination of mutations at positions corresponding to residues 131, 132, 133, 221, and 227
[0259] Δ130 plus any possible combination of mutations at positions corresponding to residues 137, 188, 192, 193, 226, and 228
[0260] Δ130 plus any possible combination of mutations at positions corresponding to residues 137, 188, 192, 193, 226, 227, 228, 131, 132, and 133
[0261] Δ130 plus any possible combination of mutations at positions corresponding to residues 227, 131, 132, and 133
[0262] Gln226Leu, Gly228Ser, Thr160Ala, Δ130
[0263] Gln226Leu, Gly228Ser, Δ130
[0264] Gln226Leu, Thr160Ala, Δ130
[0265] Gly228Ser, Thr160Ala, Δ130
[0266] Gln226Leu, Δ130
[0267] Gly228Ser, Δ130
[0268] Thr160Ala, Δ130
[0269] Δ130
[0270] Δ130, Ala131Thr, Leu133Thr, Ser137Arg, Ile155Thr, Ala188Glu, Thr/Ile192Arg/Lys, Arg/Lys193Thr/Ala, Gln226Leu, Ser227Gly, Gly228Ser
[0271] Δ130, Ala131Thr, Leu133Thr, Ser137Arg, Ile155Thr, Ala188Glu, Thr/Ile192Arg/Lys, Arg/Lys193Thr/Ala, Gln226Leu, Gly228Ser
[0272] Δ130, Ala131Thr, Leu133Thr, Ser137Arg, Ile155Thr, Asn159Asp (or Thr160Ala or both), Ala188Glu, Thr/Ile192Arg/Lys, Arg/Lys193Thr/Ala, Gln226Leu, Ser227Gly, Gly228Ser
[0273] Δ130, Ala131Thr, Leu133Thr, Ser137Arg, Ile155Thr, Asn159Asp (or Thr160Ala or both), Ala188Glu, Thr/Ile192Arg/Lys, Arg/Lys193Thr/Ala, Gln226Leu, Gly228Ser
[0274] Δ130, Ser137Arg, Ala188Glu, Thr192Arg/Lys, Arg/Lys193Thr/Met/Ala/Val, Gln226Leu, Gly228Ser
[0275] Δ130, Ser137Arg, Ala188Glu, Thr192Arg/Lys, Arg/Lys193Thr/Met/Ala/Val, Gln226Leu, Gly228Ser, Xaa131Ser/Thr, Xaa132Ser/Thr, Xaa133Ser/Thr, Ser221Pro, Ser227Gly (wherein Xaa=any amino acid)
[0276] Δ130, Xaa131Ser/Thr, Xaa132Ser/Thr, Xaa133Ser/Thr, Ser221Pro, Ser227Gly (wherein Xaa=any amino acid)
[0277] Δ130, Xaa192Xaa′ (wherein Xaa=any hydrophobic amino acid, and Xaa′=any hydrophilic amino acid)
[0278] Δ130, Xaa192Lys/Arg (wherein Xaa=any hydrophobic residue)
[0279] Δ130, Xaa193Xaa′ (wherein Xaa=a basic residue, e.g., Lys or Arg, and Xaa′=a neutral or acidic residue)
[0280] Δ130, Lys/Arg193Thr/Ala/Met/Val
[0281] Δ130, Xaa192Xaa′ (wherein Xaa=any hydrophobic amino acid, and Xaa′=any hydrophilic amino acid), Xaa193Xaa′ (wherein Xaa=a basic residue, e.g., Lys or Arg, and Xaa′=a neutral or acidic residue)
[0282] Δ130, Xaa192Lys/Arg (wherein Xaa=any hydrophobic residue), Xaa193Xaa′ (wherein Xaa=a basic residue, e.g., Lys or Arg, and Xaa′=a neutral or acidic residue)
[0283] Δ130, Xaa192Xaa′ (wherein Xaa=any hydrophobic amino acid, and Xaa′=any hydrophilic amino acid), Lys/Arg193Thr/Ala/Met/Val
[0284] Δ130, Xaa192Lys/Arg (wherein Xaa=any hydrophobic residue), Lys/Arg193Thr/Ala/Met/Val
[0285] Δ130, Ala188Glu
[0286] Δ130, Ala188Asp
[0287] Δ130, Xaa192Xaa′ (wherein Xaa=any hydrophobic amino acid, and Xaa′=any hydrophilic amino acid), Ala188Glu
[0288] Δ130, Xaa192Lys/Arg (wherein Xaa=any hydrophobic residue), Ala188Glu
[0289] Δ130, Xaa193Xaa′ (wherein Xaa=a basic residue, e.g., Lys or Arg, and Xaa′=a neutral or acidic residue), Ala188Glu
[0290] Δ130, Lys/Arg193Thr/Ala/Met/Val, Ala188Glu
[0291] Δ130, Xaa192Xaa′ (wherein Xaa=any hydrophobic amino acid, and Xaa′=any hydrophilic amino acid), Ala188Asp
[0292] Δ130, Xaa192Lys/Arg (wherein Xaa=any hydrophobic residue), Ala188Asp
[0293] Δ130, Xaa193Xaa′ (wherein Xaa=a basic residue, e.g., Lys or Arg, and Xaa′=a neutral or acidic residue), Ala188Asp
[0294] Δ130, Lys/Arg193Thr/Ala/Met/Val, Ala188Asp
[0295] Δ130, Xaa192Xaa′ (wherein Xaa=any hydrophobic amino acid, and Xaa′=any hydrophilic amino acid), Xaa193Xaa′ (wherein Xaa=a basic residue, e.g., Lys or Arg, and Xaa′=a neutral or acidic residue), Ala188Glu
[0296] Δ130, Xaa192Lys/Arg (wherein Xaa=any hydrophobic residue), Xaa193Xaa′ (wherein Xaa=a basic residue, e.g., Lys or Arg, and Xaa′=a neutral or acidic residue), Ala188Glu
[0297] Δ130, Xaa192Xaa′ (wherein Xaa=any hydrophobic amino acid, and Xaa′=any hydrophilic amino acid), Lys/Arg193Thr/Ala/Met/Val, Ala188Glu
[0298] Δ130, Xaa192Lys/Arg (wherein Xaa=any hydrophobic residue), Lys/Arg193Thr/Ala/Met/Val, Ala188Glu
[0299] Δ130, Xaa192Xaa′ (wherein Xaa=any hydrophobic amino acid, and Xaa′=any hydrophilic amino acid), Xaa193Xaa′ (wherein Xaa=a basic residue, e.g., Lys or Arg, and Xaa′=a neutral or acidic residue), Ala188Asp
[0300] Δ130, Xaa192Lys/Arg (wherein Xaa=any hydrophobic residue), Xaa193Xaa′ (wherein Xaa=a basic residue, e.g., Lys or Arg, and Xaa′=a neutral or acidic residue), Ala188Asp
[0301] Δ130, Xaa192Xaa′ (wherein Xaa=any hydrophobic amino acid, and Xaa′=any hydrophilic amino acid), Lys/Arg193Thr/Ala/Met/Val, Ala188Asp
[0302] Δ130, Xaa192Lys/Arg (wherein Xaa=any hydrophobic residue), Lys/Arg193Thr/Ala/Met/Val, Ala188Asp

[0303] In some embodiments, the present invention provides HA polypeptides (e.g., HA polypeptide variants, engineered HA polypeptides, and/or engineered HA polypeptide variants) whose amino acid sequence includes an element as set forth below:
[0304] X190, X193, X225 and X226
[0305] X190, X193, X226 and X228
[0306] X189, X193, X160
[0307] X189, X193, X226, X228
[0308] X187, X189, X193, X226, X228
[0309] X189, X193, X226, X228
[0310] X187, X189, X193, X226, X228
[0311] X156, X189, X193, X226, X228
[0312] X193, X226, X228
[0313] X193, X226, X228
[0314] X189, X193, X225
[0315] X156, X189, X193, X225
[0316] X137, X156, X189, X193, X225
[0317] X190, X193, X225
[0318] X187, X189, X190, X193, X225
[0319] X186, X187, X189, X190, X193, X225
[0320] X186, X187, X189, X190, X193, X225, X227
[0321] X226, X228, X160
[0322] X226, X228, X160
[0323] X228, X160
[0324] X226, X160
[0325] X226, X228
[0326] X160
[0327] X226, X228, Xaa158 (wherein Xaa=any amino acid besides Asn)
[0328] X228, Xaa158 (wherein Xaa=any amino acid besides Asn)
[0329] X226, Xaa158 (wherein Xaa=any amino acid besides Asn)
[0330] X226, X228
[0331] X158 (wherein Xaa=any amino acid besides Asn)
[0332] X130 plus any possible combination of X131, X132, X133, X135, X137, X155, X188, X192, X193, X221, X226, X227, and X228
[0333] X130 plus any possible combination of X131, X132, X135, X188, X192, and X221
[0334] X130 plus any possible combination of X133, X137, X155, X193, X226, X227, and X228
[0335] X130 plus any possible combination of X131, X132, X133, X135, X137, X155, Xaa158 (wherein Xaa=any amino acid besides Asn), X160, X188, X192, X193, X221, X226, X227, and X228
[0336] X130 plus any possible combination of X131, X133, X137, X155, X188, X192, X193, X226, X227, and X228
[0337] X130 plus any possible combination of X131, X133, X137, X155, X188, X192, X193, X226, and X228
[0338] X130 plus any possible combination of X131, X133, X137, X155, X159, X160, X188, X192, X193, X226, X227, and X228
[0339] X130 plus any possible combination of X131, X133, X137, X155, X159, X160, X188, X192, X193, X226, and X228
[0340] X130 plus any possible combination of X137, X188, X192, X193, X226, X228, X131, X132, X133, X221, and X227
[0341] X130 plus any possible combination of X131, X132, X133, X221, and X227
[0342] X130 plus any possible combination of X137, X188, X192, X193, X226, and X228
[0343] X130 plus any possible combination of X137, X188, X192, X193, X226, X227, X228, X131, X132, and X133
[0344] X130 plus any possible combination of X227, X131, X132, and X133
[0345] X226, X228, X160, X130
[0346] X226, X228, X130
[0347] X226, X160, X130
[0348] X228, X160, X130
[0349] X226, X130
[0350] X228, X130
[0351] X160, X130
[0352] X130
[0353] X130, X131, X133, X137, X155, X188, X192, X193, X226, X227, X228
[0354] X130, X131, X133, X137, X155, X188, X192, X193, X226, X228
[0355] X130, X131, X133, X137, X155, X159, X160, X188, X192, X193, X226, X227, X228
[0356] X130, X131, X133, X137, X155, X159, X160, X188, X192, X193, X226, X228
[0357] X130, X137, X188, X192, X193, X226, X228
[0358] X130, X137, X188, X192, X193, X226, X228, X131, X132, X133, X221, X227
[0359] X130, X131, X132, X133, X221, X227
[0360] X130, X192
[0361] X130, X193
[0362] X130, X192, X193
[0363] X130, X188
[0364] X130, X192, X188
[0365] X130, X193, X188
[0366] X130, X192, X193, X188

[0367] wherein X=any amino acid (unless otherwise specified above), and/or X=a missing amino acid. The numbering of these positions corresponds to the numbering of H3 HA.

[0368] In some embodiments X130 is a deletion at position 130. In some embodiments, X160 is an Ala. In some embodiments, X158 is any amino acid other than Asn.

[0369] In some such embodiments, the H5 HA polypeptide variant has at least one further substitution as compared with a wild type H5 HA, such that affinity and/or specificity of the variant for umbrella glycans is increased.

[0370] In some such embodiments, the HA polypeptide has at least one further substitution as compared with a wild type HA, such that affinity and/or specificity of the variant for umbrella glycans is increased.

[0371] In some embodiments, HA polypeptides in accordance with the invention (including H5 HA polypeptide variants) have sequences that include L226, S228, and A160. In some embodiments, HA polypeptides in accordance with the invention (including H5 HA polypeptide variants) have sequences that include L226 and A160. In some embodiments, HA polypeptides in accordance with the invention (including H5 HA polypeptide variants) have sequences that include S228 and A160. In some embodiments, HA polypeptides in accordance with the invention (including H5 HA polypeptide variants) have sequences that include A160.

[0372] In some embodiments, HA polypeptides in accordance with the invention (including H5 HA polypeptide variants) have sequences that include L226, S228, and X158 (wherein X=any amino acid besides Asn). In some embodiments, HA polypeptides in accordance with the invention (including H5 HA polypeptide variants) have sequences that include L226 and X158. In some embodiments, HA polypeptides in accordance with the invention (including H5 HA polypeptide variants) have sequences that include S228 and X158. In some embodiments, HA polypeptides in accordance with the invention (including H5 HA polypeptide variants) have sequences that include X158.

[0373] In some embodiments, HA polypeptides in accordance with the invention (including H5 HA polypeptide variants) have sequences that include Δ130 and any possible combination of mutations at positions corresponding to residues 131, 132, 133, 135, 137, 155, 158, 160, 188, 192, 193, 221, 226, 227, and 228.

[0374] In some embodiments, HA polypeptides in accordance with the invention (including H5 HA polypeptide variants) have sequences that include Δ130, L226, S228, A160 and any possible combination of mutations at positions corresponding to residues 131, 132, 133, 135, 137, 155, 158, 188, 192, 193, 221, and 227. In some embodiments, HA polypeptides in accordance with the invention (including H5 HA polypeptide variants) have sequences that include Δ130, L226, A160, and any possible combination of mutations at positions corresponding to residues 131, 132, 133, 135, 137, 155, 158, 188, 192, 193, 221, 227, and 228. In some embodiments, HA polypeptides in accordance with the invention (including H5 HA polypeptide variants) have sequences that include Δ130, S228, A160, and any possible combination of mutations at positions corresponding to residues 131, 132, 133, 135, 137, 155, 158, 188, 192, 193, 221, and 227. In some embodiments, HA polypeptides in accordance with the invention (including H5 HA polypeptide variants) have sequences that include Δ130, L226, S228, and any possible combination of mutations at positions corresponding to residues 131, 132, 133, 135, 137, 155, 158, 160, 188, 192, 193, 221, and 227.

[0375] In some embodiments, HA polypeptides in accordance with the invention (including H5 HA polypeptide variants) have sequences that include Δ130, A160, and any possible combination of mutations at positions corresponding to residues 131, 132, 133, 135, 137, 155, 158, 188, 192, 193, 221, 226, 227, and 228. In some embodiments, HA polypeptides in accordance with the invention (including H5 HA polypeptide variants) have sequences that include Δ130, L226, and any possible combination of mutations at positions corresponding to residues 131, 132, 133, 135, 137, 155, 158, 160, 188, 192, 193, 221, and 227, and 228. In some embodiments, HA polypeptides in accordance with the invention (including H5 HA polypeptide variants) have sequences that include Δ130, S228, and any possible combination of mutations at positions corresponding to residues 131, 132, 133, 135, 137, 155, 158, 160, 188, 192, 193, 221, 226, and 227.

[0376] In some embodiments, HA polypeptides in accordance with the invention (including H5 HA polypeptide variants) have sequences that include Δ130, L226, S228, X158 (wherein X=any amino acid besides Asn) and any possible combination of mutations at positions corresponding to residues 131, 132, 133, 135, 137, 155, 160, 188, 192, 193, 221, and 227. In some embodiments, HA polypeptides in accordance with the invention (including H5 HA polypeptide variants) have sequences that include Δ130, L226, X158, and any possible combination of mutations at positions corresponding to residues 131, 132, 133, 135, 137, 155, 160, 188, 192, 193, 221, 227, and 228. In some embodiments, HA polypeptides in accordance with the invention (including H5 HA polypeptide variants) have sequences that include Δ130, S228, X158, and any possible combination of mutations at positions corresponding to residues 131, 132, 133, 135, 137, 155, 160, 188, 192, 193, 221, and 227. In some embodiments, HA polypeptides in accordance with the invention (including H5 HA polypeptide variants) have sequences that include Δ130, L226, S228, and any possible combination of mutations at positions corresponding to residues 131, 132, 133, 135, 137, 155, 158, 160, 188, 192, 193, 221, and 227.

[0377] In some embodiments, HA polypeptides in accordance with the invention (including H5 HA polypeptide variants) have sequences that include Δ130, X158 (wherein X=any amino acid besides Asn), and any possible combination of mutations at positions corresponding to residues 131, 132, 133, 135, 137, 155, 160, 188, 192, 193, 221, 226, 227, and 228.

[0378] In some embodiments, H5 HA polypeptide variants (e.g., H5 HA polypeptide variants) in accordance with the invention have an open binding site as compared with a parent HA, and particularly with a parent wild type HAs.

[0379] In some embodiments, HA polypeptides (e.g., H5 HA polypeptides) in accordance with the invention bind to the following α2-6 sialylated glycans:

[chemical structure]

and combinations thereof. In some embodiments, H5 HA polypeptides in accordance with the invention bind to glycans of the structure:

[chemical structure]

and combinations thereof; and/or

[chemical structure]

and/or

[chemical structure]

and/or

[chemical structure]

and combinations thereof. In some embodiments, HA polypeptides (e.g., H5HA polypeptides) in accordance with the invention bind to

[chemical structure]

and/or

[chemical structure]

in some embodiments to

[chemical structure]

in some embodiments to

[chemical structure]

and in some embodiments to

[chemical structure]

and/or

[chemical structure]

[0380] In some embodiments, HA polypeptides (e.g., H5 HA polypeptides) in accordance with the invention bind to umbrella topology glycans. In some embodiments, H5 HA polypeptides in accordance with the invention bind to at least some of the glycans (e.g., α2-6 sialylated glycans) depicted in FIG. 9. In some embodiments, HA polypeptides (e.g., H5 HA polypeptides) in accordance with the invention bind to multiple glycans depicted in FIG. 9.

[0381] In some embodiments, HA polypeptides (e.g., H5 HA polypeptides) in accordance with the invention bind to at least about 10%, about 15%, about 20%, about 25%, about 30% about 35%, about 40%, about 45%, about 50%, about 55%, about 60%, about 65%, about 70%, about 75%, about 80%, about 85%, about 90% about 95%, or more of the glycans found on HA receptors in human upper respiratory tract tissues (e.g., epithelial cells).

[0382] In one aspect, the present invention provides the particular recognition that high affinity binding to umbrella-topology glycans alone may not be sufficient to confer effective transmission to/infectivity of humans. The present invention provides the insight that reduced binding to cone-topology glycans may also be important. In some embodiments, high affinity binding to umbrella-topology glycans and reduced affinity binding to cone-topology glycans may be involved in conferring effective transmission to/infectivity of humans. In some embodiments, high affinity binding to umbrella-topology glycans is sufficient to confer effective transmission to/infectivity of humans. In some embodiments, high affinity binding to umbrella-topology glycans is sufficient to confer effective transmission to/infectivity of humans, even if the affinity of binding to cone-topology glycans is not reduced (e.g., unchanged, increased, etc.).

[0383] In some embodiments, increased affinity and/or specificity of binding of an HA polypeptide variant (e.g., an H5 HA polypeptide variant) to umbrella-topology glycans and reduced affinity and/or specificity binding to cone-topology glycans may be involved in increasing or enhancing transmission to/infectivity of humans relative to a reference polypeptide (e.g., the HA polypeptide variant's cognate parent HA polypeptide). In some embodiments, increased affinity and/or specificity of binding of an HA polypeptide variant (e.g., an H5 HA polypeptide variant) to umbrella-topology glycans is sufficient to increase or enhance transmission to/infectivity of humans relative to a reference polypeptide (e.g., the HA polypeptide variant's cognate parent HA polypeptide). In some embodiments, increased affinity and/or specificity of binding of an HA polypeptide variant (e.g., an H5 HA polypeptide variant) to umbrella-topology glycans is sufficient to increase or enhance transmission to/infectivity of humans relative to a reference polypeptide (e.g., the HA polypeptide variant's cognate parent HA polypeptide), even if the affinity and/or specificity of binding to cone-topology glycans is not reduced (e.g., unchanged, increased, etc.). In some embodiments, increased affinity and/or specificity of binding of an HA polypeptide variant (e.g., an H5 HA polypeptide variant) to umbrella-topology glycans is sufficient to increase or enhance transmission to/infectivity of humans relative to a reference polypeptide (e.g., the HA polypeptide variant's cognate parent HA polypeptide), even if the affinity and/or specificity of binding to cone-topology glycans is equal to and/or greater than that of the affinity and/or specificity of binding to umbrella-topology glycans.

[0384] Portions or Fragments of HA Polypeptides

[0385] The present invention further provides characteristic portions (which may or may not be binding agents) of HA polypeptides in accordance with the invention and nucleic acids that encode them. In general, a characteristic portion is one that contains a continuous stretch of amino acids, or a collection of continuous stretches of amino acids, that together are characteristic of the HA polypeptide. Each such continuous stretch generally will contain at least two amino acids. Furthermore, those of ordinary skill in the art will appreciate that typically at least 5, at least 10, at least 15, at least 20 or more amino acids are required to be characteristic of a H5 HA polypeptide. In general, a characteristic portion is one that, in addition to the sequence identity specified above, shares at least one functional characteristic with the relevant intact HA polypeptide. In some embodiments, characteristic portions of HA polypeptides in accordance with the invention share glycan binding characteristics with the relevant full-length HA polypeptides.

[0386] Non-HA Polypeptides

[0387] In some embodiments, binding agents provided in accordance with the present invention are polypeptides whose amino acid sequence does not include a characteristic HA sequence. Such polypeptides are referred to herein as “Non-HA polypeptides”. In some embodiments, a Non-HA polypeptide has an amino acid sequence selected in advance (e.g., via rational design, including for example, introduction of strategic amino acid alterations [e.g., additions, deletions, and/or substitutions] as compared with a reference sequence). In some embodiments, a Non-HA polypeptide has an amino acid sequence that is determined stochastically and, for example, identified on the basis of the desirable binding characteristics defined herein.

[0388] Antibodies

[0389] In some embodiments, binding agents provided in accordance with the present invention are antibodies (e.g., that bind to umbrella topology glycans and/or to umbrella topology glycan mimics). Antibodies suitable for the invention include antibodies or fragments of antibodies that bind immunospecifically to any umbrella topology glycan epitope. As used herein, the term “antibodies” is intended to include immunoglobulins and fragments thereof which are specifically reactive to the designated protein or peptide, or fragments thereof. Suitable antibodies include, but are not limited to, human antibodies, primatized antibodies, chimeric antibodies, bi-specific antibodies, humanized antibodies, conjugated antibodies (i.e., antibodies conjugated or fused to other proteins, radiolabels, cytotoxins), Small Modular ImmunoPharmaceuticals (“SMIPs™”), single chain antibodies, cameloid antibodies, and antibody fragments. As used herein, the term “antibodies” also includes intact monoclonal antibodies, polyclonal antibodies, single domain antibodies (e.g., shark single domain antibodies (e.g., IgNAR or fragments thereof)), multispecific antibodies (e.g. bi-specific antibodies) formed from at least two intact antibodies, and antibody fragments so long as they exhibit the desired biological activity. Antibody polypeptides for use herein may be of any type (e.g., IgA, IgD, IgE, IgG, IgM).

[0390] As used herein, an “antibody fragment” includes a portion of an intact antibody, such as, for example, the antigen-binding or variable region of an antibody. Examples of antibody fragments include Fab, Fab′, F(ab′)2, and Fv fragments; triabodies; tetrabodies; linear antibodies; single-chain antibody molecules; and multi specific antibodies formed from antibody fragments. The term “antibody fragment” also includes any synthetic or genetically engineered protein that acts like an antibody by binding to a specific antigen to form a complex. For example, antibody fragments include isolated fragments, “Fv” fragments, consisting of the variable regions of the heavy and light chains, recombinant single chain polypeptide molecules in which light and heavy chain variable regions are connected by a peptide linker (“ScFv proteins”), and minimal recognition units consisting of the amino acid residues that mimic the hypervariable region.

[0391] Antibodies can be generated using methods well known in the art. For example, protocols for antibody production are described by Harlow and Lane, 1988, Antibodies: A Laboratory Manual; incorporated herein by reference. Typically, antibodies can be generated in mouse, rat, guinea pig, hamster, camel, llama, shark, or other appropriate host. Alternatively, antibodies may be made in chickens, producing IgY molecules (Schade et al., 1996, ALTEX 13(5):80-85; incorporated herein by reference). In some embodiments, antibodies suitable for the present invention are subhuman primate antibodies. For example, general techniques for raising therapeutically useful antibodies in baboons may be found, for example, in Goldenberg et al., international patent publication number WO 91/11465, 1991; and in Losman et al., 1990, Int. J. Cancer 46:310; both of which are incorporated herein by reference). In some embodiments, monoclonal antibodies may be prepared using hybridoma methods (Milstein and Cuello, 1983, Nature 305(5934):537-40; incorporated herein by reference). In some embodiments, monoclonal antibodies may also be made by recombinant methods (U.S. Pat. No. 4,166,452, 1979; incorporated herein by reference).

[0392] In some embodiments, antibodies suitable for the invention may include humanized or human antibodies. Humanized forms of non-human antibodies are chimeric Igs, Ig chains or fragments (such as Fv, Fab, Fab′, F(ab′)2 or other antigen-binding subsequences of Abs) that contain minimal sequence derived from non-human Ig. Generally, a humanized antibody has one or more amino acid residues introduced from a non-human source. These non-human amino acid residues are often referred to as “import” residues, which are typically taken from an “import” variable domain. Humanization is accomplished by substituting rodent complementarity determining regions (CDRs) or CDR sequences for the corresponding sequences of a human antibody (Riechmann et al., 1988, Nature 332(6162):323-7; Verhoeyen et al., 1988, Science. 239(4847):1534-6; both of which are incorporated herein by reference). Such “humanized” antibodies are chimeric Abs (U.S. Pat. No. 4,816,567, 1989; incorporated herein by reference), wherein substantially less than an intact human variable domain has been substituted by the corresponding sequence from a non-human species. In some embodiments, humanized antibodies are typically human antibodies in which some CDR residues and possibly some FR residues are substituted by residues from analogous sites in rodent Abs. Humanized antibodies include human Igs (recipient antibody) in which residues from a CDR of the recipient are replaced by residues from a CDR of a non-human species (donor antibody) such as mouse, rat or rabbit, having the desired specificity, affinity and capacity. In some instances, corresponding non-human residues replace Fv framework residues of the human Ig. Humanized antibodies may comprise residues that are found neither in the recipient antibody nor in the imported CDR or framework sequences. In general, the humanized antibody comprises substantially all of at least one, and typically two, variable domains, in which most if not all of the CDR regions correspond to those of a non-human Ig and most if not all of the FR regions are those of a human Ig consensus sequence. The humanized antibody optimally also comprises at least a portion of an Ig constant region (Fc), typically that of a human Ig (Riechmann et al., 1988, Nature 332(6162):323-7; Verhoeyen et al., 1988, Science. 239(4847):1534-6; both of which are incorporated herein by reference).

[0393] Human antibodies can also be produced using various techniques, including phage display libraries (Hoogenboom et al., 1991, Mol Immunol. 28(9):1027-37; Marks et al., 1991, J Mol Biol. 222(3):581-97; both of which are incorporated herein by reference) and the preparation of human monoclonal antibodies (Reisfeld and Sell, 1985, Cancer Surv. 4(1):271-90; incorporated herein by reference). Similarly, introducing human Ig genes into transgenic animals in which the endogenous Ig genes have been partially or completely inactivated can be exploited to synthesize human antibodies. Upon challenge, human antibody production is observed, which closely resembles that seen in humans in all respects, including gene rearrangement, assembly, and antibody repertoire (Fishwild et al., 1996, Nat Biotechnol. 14(7):845-51; Lonberg et al., 1994, Nature 368(6474):856-9; Lonberg and Huszar, 1995, Int. Rev. Immunol. 13(1):65-93; Marks et al., 1992, Biotechnology (N Y). 10(7):779-83; all of which are incorporated herein by reference).

[0394] Lectins

[0395] In some embodiments, binding agents provided in accordance with the present invention are lectins. Lectins are sugar-binding proteins which may bind to a soluble carbohydrate or to a carbohydrate moiety which is a part of a glycoconjugate (e.g., a glycopeptide or glycolipid). Lectins typically agglutinate certain animal cells and/or precipitate glycoconjugates by recognizing a particular sugar moiety. For example, SNA-1 is a lectin that has a high affinity for α2-6 sialic acids. As yet another example, polyporus squamosus lectins (PSL1a and PSL1b) have high affinity for binding sialylated glycoconjugates containing Neu5Acα2,6Galβ1,4Glc/GlcNAc trisaccharide sequences of asparagine-linked glycoproteins. Non-limiting exemplary lectins that may act as binding agents include SNA-1, SNA-1′, PSL1a, PSL1b, and polypeptides derived therefrom.

[0396] Amino acid sequences of exemplary lectins are provided below:

Sambucus Nigra Lectin 1 (Genbank Accession No. U27122):
(SEQ ID NO: 56)
MRLVAKLLYLAVLAICGLGIHGALTHPRVTPPVYPSVSFNLTGADTYEPFLRALQEKVILGNHTA
FDLPVLNPESQVSDSNRFVLVPLTNPSGDTVTLAIDVVNLYVVAFSSNGKSYFFSGSTAVQRDNL
FVDTTQEELNFTGNYTSLERQVGFGRVYIPLGPKSLDQAISSLRTYTLTAGDTKPLARGLLVVIQ
MVSEAARFRYIELRIRTSITDASEFTPDLLMLSMENNWSSMSSEIQQAQPGGIFAGVVQLRDERN
NSIEVTNFRRLFELTYIAVLLYGCAPVTSSSYSNNAIDAQIIKMPVFRGGEYEKVCSVVEVTRRI
SGWDGLCVDVRYGHYIDGNPVQLRPCGNECNQLWTFRTDGTIRWLGKCLTASSSVMIYDCNTVPP
EATKWVVSIDGTITNPHSGLVLTAPQAAEGTALSLENNIHAARQGWTVGDVEPLVTFIVGYKQMC
LRENGENNFVWLEDCVLNRVQQEWALYGDGTIRVNSNRSLCVTSEDHEPSDLIVILKCEGSGNQR
WVFNTNGTISNPNAKLLMDVAQRDVSLRKIILYRPTGNPNQQWITTTHPA
Sambucus Nigra Lectin 1′ (Genbank Accession No. U66191):
(SEQ ID NO: 57)
MKVVATILYLVVLAICGLGIHGAHPTHSAPPTVYPSVSFNLTEANSNEYRHFLQELRGKVILGSH
RAFDLPVLNPESKVSDSDRFVLVRLTNPSRKKVTLAIDVVTFYVVAFAQNDRSYFFSGSSEVQRE
NLFVDTTQEDLNFKGDYTSLEHQVGFGRVYIPLGPKSLAQSISSLSTYKSSAGDNKRLARSLLVV
IQMVSEAARFRYIQLRIQASITDAKEFTPDLLMLSMENKWSSMSSEIQQAQPGGAFAQVVKLLDQ
RNHPIDVTNFRRLFQLTSVAVLLHGCPTVTKMPAYIIKMPVFNGGEDEERCSVVEEVTRRIGGRD
GFCAEVKNGDEKDGTPVQLSSCGEQSNQQWTFSTDGTIQSLGKCLTTSSSVMIYNCKVVPPESTK
WVVSIDGTITNPRSGLVLTAPKAAEGTLVSLEKNVHAARQGWIVGNVEPLVTFIVGYEQMCLETN
PGNNDVSLGDCSVKSASKVDQKWALYGDGTIRVNNDRSLCVTSEGKSSNEPIIILKCLGWANQRW
VFNTDGTISNPDSKLVMHVDQNDVPLRKIILSHPSGTSNQQWIASTHPA
Polyporous squamosus lectin 1a (UniProt Q75WT9)
(SEQ ID NO: 58)
MSFQGHGIYYIASAYVANTRLALSEDSSANKSPDVIISSDAVDPLNNLWLIEPVGEADTYTVRNA
FAGSYMDLAGHAATDGTAIIGYRPTGGDNQKWIISQINDVWKIKSKETGTFVTLLNGDGGGTGTV
VGWQNITNNTSQNWTFQKLSQTGANVHATLLACPALRQDFKSYLSDGLYLVLTRDQISSIWQASG
LGSTPWRSEIFDCDDFATVFKGAVAKWGNENFKANGFALLCGLMFGSKSSGAHAYNWFVERGNFS
TVTFFEPQNGTYSANAWDYKAYFGLF
Polyporous squamosus lectin 1b (UniProt Q75WT8)
(SEQ ID NO: 59)
MSFEGHGIYHIPHAHVANIRMALANRGSGQNGTPVIAWDSNNDAFDHMWLVEPTGEADTYTIHNV
STGTYMDVTASAVADNTPIIGYQRTGNDNQKWIIRQVQTDGGDRPWKIQCKATGTFATLYSGGGS
GTAIVGWRLVNSNGNQDWVFQKLSQTSVNVHATLLACGATVGQDFKNYLYDGLYLVLPRDRISAI
WKASGLGETARRDGIYDSDEFAMTFKSAAATWGKENFKADGFAILCGMMFGTKASTNRHAYNWVV
ERGSFSTVTFFEPQNGTYSDDAWGYKAYFGLF

[0397] Aptamers

[0398] In some embodiments, binding agents provided in accordance with the present invention are aptamers. Aptamers are macromolecules composed of nucleic acid (e.g., RNA, DNA) that bind tightly to a specific molecular target (e.g., an umbrella topology glycan). A particular aptamer may be described by a linear nucleotide sequence and is typically about 15 to about 60 nucleotides in length. Without wishing to be bound by any theory, it is contemplated that the chain of nucleotides in an aptamer form intramolecular interactions that fold the molecule into a complex three-dimensional shape, and this three-dimensional shape allows the aptamer to bind tightly to the surface of its target molecule. Given the extraordinary diversity of molecular shapes that exist within the universe of all possible nucleotide sequences, aptamers may be obtained for a wide array of molecular targets, including proteins and small molecules. In addition to high specificity, aptamers have very high affinities for their targets (e.g., affinities in the picomolar to low nanomolar range for proteins). Aptamers are chemically stable and can be boiled or frozen without loss of activity. Because they are synthetic molecules, they are amenable to a variety of modifications, which can optimize their function for particular applications. For example, aptamers can be modified to dramatically reduce their sensitivity to degradation by enzymes in the blood for use in in vivo applications. In addition, aptamers can be modified to alter their biodistribution or plasma residence time.

[0399] Selection of aptamers that can bind umbrella topology glycans (and/or to umbrella topology glycan mimics) can be achieved through methods known in the art. For example, aptamers can be selected using the SELEX (Systematic Evolution of Ligands by Exponential Enrichment) method (Tuerk and Gold, 1990, Science 249:505-510; incorporated herein by reference). In the SELEX method, a large library of nucleic acid molecules (e.g., 10¹⁵ different molecules) is produced and/or screened with the target molecule (e.g., an umbrella topology glycan of umbrella topology glycan epitope). The target molecule is allowed to incubate with the library of nucleotide sequences for a period of time. Several methods, known in the art, can then be used to physically isolate the aptamer target molecules from the unbound molecules in the mixture, which can be discarded. The aptamers with the highest affinity for the target molecule can then be purified away from the target molecule and amplified enzymatically to produce a new library of molecules that is substantially enriched for aptamers that can bind the target molecule. The enriched library can then be used to initiate a new cycle of selection, partitioning, and amplification. After 5-15 cycles of this iterative selection, partitioning and amplification process, the library is reduced to a small number of aptamers that bind tightly to the target molecule. Individual molecules in the mixture can then be isolated, their nucleotide sequences determined, and their properties with respect to binding affinity and specificity measured and compared. Isolated aptamers can then be further refined to eliminate any nucleotides that do not contribute to target binding and/or aptamer structure, thereby producing aptamers truncated to their core binding domain. See Jayasena, 1999, Clin. Chem. 45:1628-50 for review of aptamer technology; the entire teachings of which are incorporated herein by reference).

### Production of Polypeptides

[0400] Polypeptides in accordance with the invention (e.g., HA polypeptides and/or Non-HA polypeptides), and/or characteristic portions thereof, or nucleic acids encoding them, may be produced by any available means.

[0401] Polypeptides in accordance with the invention (or characteristic portions thereof) may be produced, for example, by utilizing a host cell system engineered to express a polypeptide-encoding nucleic acid in accordance with the invention.

[0402] Any system can be used to produce polypeptides (or characteristic portions), such as egg, baculovirus, plant, yeast, Madin-Darby Canine Kidney cells (MDCK), or Vero (African green monkey kidney) cells. Alternatively or additionally, polypeptides (or characteristic portions) can be expressed in cells using recombinant techniques, such as through the use of an expression vector (Sambrook et al., Molecular Cloning: A Laboratory Manual, CSHL Press, 1989; incorporated herein by reference).

[0403] Alternatively or additionally, polypeptides in accordance with the invention (or characteristic portions thereof) can be produced by synthetic means.

[0404] Alternatively or additionally, polypeptides in accordance with the invention (or characteristic portions thereof), and particularly HA polypeptides, may be produced in the context of intact virus, whether otherwise wild type, attenuated, killed, etc. Polypeptides in accordance with the invention (e.g., HA polypeptides), or characteristic portions thereof, may also be produced in the context of virus like particles.

[0405] In some embodiments, HA polypeptides (or characteristic portions thereof) can be isolated and/or purified from influenza virus. For example, virus may be grown in eggs, such as embryonated hen eggs, in which case the harvested material is typically allantoic fluid. Alternatively or additionally, influenza virus may be derived from any method using tissue culture to grow the virus. Suitable cell substrates for growing the virus include, for example, dog kidney cells such as MDCK or cells from a clone of MDCK, MDCK-like cells, monkey kidney cells such as AGMK cells including Vero cells, cultured epithelial cells as continuous cell lines, 293T cells, BK-21 cells, CV-1 cells, or any other mammalian cell type suitable for the production of influenza virus for vaccine purposes, readily available from commercial sources (e.g., ATCC, Rockville, Md.). Suitable cell substrates also include human cells such as MRC-5 cells. Suitable cell substrates are not limited to cell lines; for example primary cells such as chicken embryo fibroblasts are also included.

[0406] Also, it will be appreciated by those of ordinary skill in the art that polypeptides, and particularly variant HA polypeptides as described herein, may be generated, identified, isolated, and/or produced by culturing cells or organisms that produce the polypeptide (whether alone or as part of a complex, including as part of a virus particle or virus), under conditions that allow ready screening and/or selection of polypeptides capable of binding to umbrella-topology glycans. To give but one example, in some embodiments, it may be useful to produce and/or study a collection of polypeptides (e.g., HA variant polypeptides) under conditions that reveal and/or favor those variants that bind to umbrella topology glycans (e.g., with particular specificity and/or affinity). In some embodiments, such a collection of polypeptides (e.g., HA variant polypeptides) results from evolution in nature. In some embodiments, such a collection of polypeptides (e.g., HA variant polypeptides) results from engineering. In some embodiments, such a collection of polypeptides (e.g., HA variant polypeptides) results from a combination of engineering and natural evolution.

### HA Receptors

[0407] HA interacts with the surface of cells by binding to a glycoprotein receptor. Binding of HA to HA receptors is predominantly mediated by N-linked glycans on the HA receptors. Specifically, HA on the surface of flu virus particles recognizes sialylated glycans that are associated with HA receptors on the surface of the cellular host. After recognition and binding, the host cell engulfs the viral cell and the virus is able to replicate and produce many more virus particles to be distributed to neighboring cells. Some crystal structures of exemplary HA-glycan interactions have been identified and are presented in Table 1:

TABLE 1
Crystal Structures of HA-Glycan Complexes

| Abbreviation (PDB ID) | Virus Strain | Glycan (with assigned coordinates) |
|---|---|---|
| ADkALB76_H1_26 | A/duck/Alberta/76 (H1N1) | Neu5Ac |
| (2WRH) | | |
| ASI30_H1_23 (1RV0) | A/Swine/Iowa/30 (H1N1) | Neu5Ac |
| ASI30_H1_26 (1RVT) | A/Swine/Iowa/30 (H1N1) | Neu5Acα6Galβ4GlcNAcβ3Galβ4Glc |
| ASC18_H1_26 (2WRG) | A/South Carolina/1/18 (H1N1) | Neu5Acα6Galβ4GlcNAcβ3Gal |
| APR34_H1_23 (1RVX) | A/Puerto Rico/8/34 (H1N1) | Neu5Acα3Galβ4GlcNAc |
| APR34_H1_26 (1RVZ) | A/Puerto Rico/8/34 (H1N1) | Neu5Acα6Galβ4GlcNAc |
| ACkNY91_H2_23 (2WR2) | A/chicken/NY/29878/91 (H2N2) | Neu5Acα3Galβ3GlcNAc |
| AckNY91_H2_26 (2WR1) | A/chicken/NY/29878/91 (H2N2) | Neu5Acα6Galβ4GlcNAc |
| AdkON77_H2_23 (2WR3) | A/duck/Ontario/77 (H2N2) | Neu5Acα3Galβ4GlcNAc |
| AdkON77_H2_26 (2WR4) | A/duck/Ontario/77 (H2N2) | Neu5Acα6Galβ4GlcNAc |
| AckPD84_H2_26 (2WRF) | A/chicken/Potsdam/475/84 (H2N2) | Neu5Acα6Gal |
| ASING57_H2_23 (2WRB) | A/Singapore/1/57 (H2N2) | Neu5Ac |
| ASING57_H2_26 (2WR7) | A/Singapore/1/57 (H2N2) | Neu5Acα6Galβ4GlcNAcβ3Gal |
| AJAP57_H2_26(2WRE) | A/Japan/305/57 (H2N2) | Neu5Acα6Gal |
| ADU63_H3_23 (1MQM) | A/Duck/Ukraine/1/63 (H3N8) | Neu5Acα3Gal |
| ADU63_H3_26 (1MQN) | A/Duck/Ukraine/1/63 (H3N8) | Neu5Acα6Gal |
| AAI68_H3_23 (1HGG) | A/Aichi/2/68 (H3N2) | Neu5Acα3Galβ4Glc |
| ADS97_H5_23 (1JSN) | A/Duck/Singapore/3/97 (H5N3) | Neu5Acα3Galβ3GlcNAc |
| ADS97_H5_26(1JSO) | A/Duck/Singapore/3/97 (H5N3) | Neu5Ac |
| Viet1203_04_H5 (2FK0) | A/Vietnam/1203/2004 (H5N1) | |
| Viet1194_04_H5 (2IBX) | A/Vietnam/1194/2004 (H5N1) | |
| ASI30_H1_23 (1RV0) | A/Swine/Iowa/30 (H1N1) | Neu5Ac |
| ASI30_H1_26 (1RVT) | A/Swine/Iowa/30 (H1N1) | Neu5Acα6Galβ4GlcNAcβ3Galβ4Glc |
| APR34_H1_23 (1RVX) | A/Puerto Rico/8/34 (H1N1) | Neu5Acα3Galβ4GlcNAc |
| APR34_H1_26 (1RVZ) | A/Puerto Rico/8/34 (H1N1) | Neu5Acα6Galβ4GlcNAc |
| ADU63_H3_23 (1MQM) | A/Duck/Ukraine/1/63 (H3N8) | Neu5Acα3Gal |
| ADU63_H3_26 (1MQN) | A/Duck/Ukraine/1/63 (H3N8) | Neu5Acα6Gal |
| AAI68_H3_23 (1HGG) | A/Aichi/2/68 (H3N2) | Neu5Acα3Galβ4Glc |
| ADS97_H5_23 (1JSN) | A/Duck/Singapore/3/97 (H5N3) | Neu5Acα3Galβ3GlcNAc |
| ADS97_H5_26(1JSO) | A/Duck/Singapore/3/97 (H5N3) | Neu5Ac |
| Viet04_H5 (2FK0) | A/Vietnam/1203/2004 (H5N1) | |

[0408] HA-α2-6 sialylated glycan complexes were generated by superimposition of the CA trace of the HA1 subunit of ADU63_H3 and ADS97_H5 and Viet04_H5 on ASI30_H1_{—}26 and APR34_H1_{—}26 (H1). Although the structural complexes of the human A/Aichi/2/68 (H3N2) with α2-6 sialylated glycans are published (Eisen et al., 1997, Virology, 232:19; incorporated herein by reference), their coordinates were not available in the Protein Data Bank. The SARF2 (123d.ncifcrf.gov/sarf2.html) program was used to obtain the structural alignment of the different HA1 subunits for superimposition.

[0409] HA receptors are modified by either α2-3 or α2-6 sialylated glycans near the receptor's HA-binding site, and the type of linkage of the receptor-bound glycan can affect the conformation of the receptor's HA-binding site, thus affecting the receptor's specificity for different HAs.

[0410] For example, the glycan binding pocket of avian HA is narrow. According to the present invention, this pocket binds to the trans conformation of α2-3 sialylated glycans, and/or to cone-topology glycans, whether α2-3 or α2-6 linked.

[0411] HA receptors in avian tissues, and also in human deep lung and gastrointestinal (GI) tract tissues are characterized by α2-3 sialylated glycan linkages, and furthermore (according to the present invention), are characterized by glycans, including α2-3 sialylated and/or α2-6 sialylated glycans, which predominantly adopt cone topologies. HA receptors having such cone-topology glycans may be referred to herein as CTHArs.

[0412] By contrast, human HA receptors in the bronchus and trachea of the upper respiratory tract are modified by α2-6 sialylated glycans. Unlike the α2-3 motif, the α2-6 motif has an additional degree of conformational freedom due to the C6-C5 bond (Russell et al., 2006, Glycoconj J 23:85; incorporated herein by reference). HAs that bind to such α2-6 sialylated glycans have a more open binding pocket to accommodate the diversity of structures arising from this conformational freedom. Moreover, according to the present invention, HAs may need to bind to glycans (e.g., α2-6 sialylated glycans) in an umbrella topology, and particularly may need to bind to such umbrella topology glycans with strong affinity and/or specificity, in order to effectively mediate infection of human upper respiratory tract tissues. HA receptors having umbrella-topology glycans may be referred to herein as UTHArs.

[0413] As a result of these spatially restricted glycosylation profiles, humans are not usually infected by viruses containing many wild type avian HAs (e.g., avian H5). Specifically, because the portions of the human respiratory tract that are most likely to encounter virus (i.e., the trachea and bronchi) lack receptors with cone glycans (e.g., α2-3 sialylated glycans, and/or short glycans) and wild type avian HAs typically bind primarily or exclusively to receptors associated with cone glycans (e.g., α2-3 sialylated glycans, and/or short glycans), humans rarely become infected with avian viruses. Only when in sufficiently close contact with virus that it can access the deep lung and/or gastrointestinal tract receptors having umbrella glycans (e.g., long α2-6 sialylated glycans) do humans become infected.

### Glycan Arrays

[0414] To rapidly expand the current knowledge of known specific glycan-glycan binding protein (GBP) interactions, the Consortium for Functional Glycomics (CFG; www.functionalglycomics.org), an international collaborative research initiative, has developed glycan arrays comprising several glycan structures that have enabled high throughput screening of GBPs for novel glycan ligand specificities. The glycan arrays comprise both monovalent and polyvalent glycan motifs (i.e. attached to polyacrylamide backbone), and each array comprises 264 glycans with low (10 μM) and high (100 μM) concentrations, and six spots for each concentration (see www.functionalglycomics.org/static/consortium/resources/resourcecoreh5.shtml).

[0415] The arrays predominantly comprise synthetic glycans that capture the physiological diversity of N- and O-linked glycans. In addition to the synthetic glycans, N-linked glycan mixtures derived from different mammalian glycoproteins are also represented on the array.

[0416] As used herein, a glycan “array” refers to a set of one or more glycans, optionally immobilized on a solid support. In some embodiments, an “array” is a collection of glycans present as an organized arrangement or pattern at two or more locations that are physically separated in space. Typically, a glycan array will have at least 4, at least 8, at least 16, at least 24, at least 48, at least 96, or several hundred or thousand discrete locations. In general, glycan arrays in accordance with the invention may have any of a variety of formats. Various different array formats applicable to biomolecules are known in the art. For example, a huge number of protein and/or nucleic acid arrays are well known. Those of ordinary skill in the art will immediately appreciate standard array formats appropriate for glycan arrays of the present invention.

[0417] In some embodiments, glycan arrays in accordance with the invention are present in “microarray” formats. A microarray may typically have sample locations separated by a distance of about 50μ to about 200μ or less and immobilized sample in the nano to micromolar range or nano to picogram range. Array formats known in the art include, for example, those in which each discrete sample location has a scale of, for example, ten μ.

[0418] In some embodiments, glycan arrays in accordance with the invention comprise a plurality of glycans spatially immobilized on a support. The present invention provides glycan molecules arrayed on a support. As used herein, “support” refers to any material which is suitable to be used to array glycan molecules. As will be appreciated by those of ordinary skill in the art, any of a wide variety of materials may be employed. To give but a few examples, support materials which may be of use in the invention include hydrophobic membranes, for example, nitrocellulose, PVDF or nylon membranes. Such membranes are well known in the art and can be obtained from, for example, Bio-Rad, Hemel Hempstead, UK.

[0419] In some embodiments, the support on which glycans are arrayed may comprise a metal oxide. Suitable metal oxides include, but are not limited to, titanium oxide, tantalum oxide, and aluminum oxide. Examples of such materials may be obtained from Sigma-Aldrich Company Ltd, Fancy Road, Poole, Dorset. BH12 4QH UK.

[0420] In some embodiments, such a support is or comprises a metal oxide gel. A metal oxide gel is considered to provide a large surface area within a given macroscopic area to aid immobilization of the carbohydrate-containing molecules.

[0421] Additional or alternative support materials which may be used in accordance with the present invention include gels, for example silica gels or aluminum oxide gels. Examples of such materials may be obtained from, for example, Merck KGaA, Darmstadt, Germany.

[0422] In some embodiments, glycan arrays are immobilized on a support that can resist change in size or shape during normal use. For example a support may be a glass slide coated with a component material suitable to be used to array glycans. Also, some composite materials can desirable provide solidity to a support.

[0423] As demonstrated herein, arrays in accordance with the invention are useful for the identification and/or characterization of different HA polypeptides and their binding characteristics. In some embodiments, HA polypeptides in accordance with the invention are tested on such arrays to assess their ability to bind to umbrella topology glycans (e.g., to α2-6 sialylated glycans, and particularly to long α2-6 sialylated glycans arranged in an umbrella topology).

[0424] Indeed, the present invention provides arrays of α2-6 sialylated glycans, and optionally α2-3 sialylated glycans, that can be used to characterize HA polypeptide binding capabilities and/or as a diagnostic to detect, for example, human-binding HA polypeptides. In some embodiments, arrays in accordance with the invention contain glycans (e.g., α2-6 sialylated glycans, and particularly long α2-6 sialylated glycans) in an umbrella topology. As will be clear to those of ordinary skill in the art, such arrays are useful for characterizing or detecting any HA polypeptides, including for example, those found in natural influenza isolates in addition to those designed and/or prepared by researchers.

[0425] In some embodiments, such arrays include glycans representative of about 10%, about 15%, about 20%, about 25%, about 30% about 35%, about 40%, about 45%, about 50%, about 55%, about 60%, about 65%, about 70%, about 75%, about 80%, about 85%, about 90% about 95%, or more of the glycans (e.g., the umbrella glycans, which will often be α2-6 sialylated glycans, particularly long α2-6 sialylated glycans) found on human HA receptors, and particularly on human upper respiratory tract HA receptors. In some embodiments, arrays in accordance with the invention include some or all of the glycan structures depicted in FIG. 10 In some embodiments, arrays include at least about 10%, about 15%, about 20%, about 25%, about 30% about 35%, about 40%, about 45%, about 50%, about 55%, about 60%, about 65%, about 70%, about 75%, about 80%, about 85%, about 90%, about 95%, or more of these depicted glycans.

[0426] The present invention provides methods for identifying or characterizing HA proteins using glycan arrays. In some embodiments, for example, such methods comprise steps of (1) providing a sample containing HA polypeptide, (2) contacting the sample with a glycan array comprising, and (3) detecting binding of HA polypeptide to one or more glycans on the array.

[0427] Suitable sources for samples containing HA polypeptides to be contacted with glycan arrays according to the present invention include, but are not limited to, pathological samples, such as blood, serum/plasma, peripheral blood mononuclear cells/peripheral blood lymphocytes (PBMC/PBL), sputum, urine, feces, throat swabs, dermal lesion swabs, cerebrospinal fluids, cervical smears, pus samples, food matrices, and tissues from various parts of the body such as brain, spleen, and liver. Alternatively or additionally, other suitable sources for samples containing HA polypeptides include, but are not limited to, environmental samples such as soil, water, and flora. Yet other samples include laboratory samples, for example of engineered HA polypeptides designed and/or prepared by researchers. Other samples that have not been listed may also be applicable.

[0428] A wide variety of detection systems suitable for assaying HA polypeptide binding to glycan arrays in accordance with the invention are known in the art. For example, HA polypeptides can be detectably labeled (directly or indirectly) prior to or after being contacted with the array; binding can then be detected by detection of localized label. In some embodiments, scanning devices can be utilized to examine particular locations on an array.

[0429] Alternatively or additionally, binding to arrayed glycans can be measured using, for example, calorimetric, fluorescence, or radioactive detection systems, or other labeling methods, or other methods that do not require labeling. In general, fluorescent detection typically involves directly probing the array with a fluorescent molecule and monitoring fluorescent signals. Alternatively or additionally, arrays can be probed with a molecule that is tagged (for example, with biotin) for indirect fluorescence detection (in this case, by testing for binding of fluorescently-labeled streptavidin). Alternatively or additionally, fluorescence quenching methods can be utilized in which the arrayed glycans are fluorescently labeled and probed with a test molecule (which may or may not be labeled with a different fluorophore). In such embodiments, binding to the array acts to squelch the fluorescence emitted from the arrayed glycan, therefore binding is detected by loss of fluorescent emission. Alternatively or additionally, arrayed glycans can be probed with a live tissue sample that has been grown in the presence of a radioactive substance, yielding a radioactively labeled probe. Binding in such embodiments can be detected by measuring radioactive emission.

[0430] Such methods are useful to determine the fact of binding and/or the extent of binding by HA polypeptides to glycan arrays in accordance with the invention. In some embodiments, such methods can further be used to identify and/or characterize agents that interfere with or otherwise alter glycan-HA polypeptide interactions.

[0431] Methods described below may be of particular use in, for example, identifying whether a molecule thought to be capable of interacting with a carbohydrate can actually do so, or to identify whether a molecule unexpectedly has the capability of interacting with a carbohydrate.

[0432] The present invention also provides methods of using arrays in accordance with the invention, for example, to detect a particular agent in a test sample. For instance, such methods may comprise steps of (1) contacting a glycan array with a test sample (e.g., with a sample thought to contain an HA polypeptide); and, (2) detecting the binding of any agent in the test sample to the array.

[0433] Yet further, binding to arrays in accordance with the invention may be utilized, for example, to determine kinetics of interaction between binding agent and glycan. For example, methods in accordance with the invention for determining interaction kinetics may include steps of (1) contacting a glycan array with the molecule being tested; and, (2) measuring kinetics of interaction between the binding agent and arrayed glycan(s).

[0434] The kinetics of interaction of a binding agent with any of the glycans in an array in accordance with the invention can be measured by real time changes in, for example, colorimetric or fluorescent signals, as detailed above. Such methods may be of particular use in, for example, determining whether a particular binding agent is able to interact with a specific carbohydrate with a higher degree of binding than does a different binding agent interacting with the same carbohydrate.

[0435] It will be appreciated, of course, that glycan binding by HA polypeptides in accordance with the invention can be evaluated on glycan samples or sources not present in an array format per se. For example, HA polypeptides in accordance with the invention can be bound to tissue samples and/or cell lines to assess their glycan binding characteristics. Appropriate cell lines include, for example, any of a variety of mammalian cell lines, particularly those expressing HA receptors containing umbrella topology glycans (e.g., at least some of which may be α2-6 sialylated glycans, and particularly long α2-6 sialylated glycans). In some embodiments, utilized cell lines express individual glycans with umbrella topology. In some embodiments, utilized cell lines express a diversity of glycans. In some embodiments, cell lines are obtained from clinical isolates; in some they are maintained or manipulated to have a desired glycan distribution and/or prevalence. In some embodiments, tissue samples and/or cell lines express glycans characteristic of mammalian upper respiratory epithelial cells.

### Nucleic Acids

[0436] In some embodiments, the present invention provides nucleic acids which encode an HA polypeptide or a characteristic or biologically active portion of an HA polypeptide. In some embodiments, the invention provides nucleic acids which are complementary to nucleic acids which encode an HA polypeptide or a characteristic or biologically active portion of an HA polypeptide.

[0437] In some embodiments, the invention provides nucleic acid molecules which hybridize to nucleic acids encoding an HA polypeptide or a characteristic or biologically active portion of an HA polypeptide. Such nucleic acids can be used, for example, as primers or as probes. To give but a few examples, such nucleic acids can be used as primers in polymerase chain reaction (PCR), as probes for hybridization (including in situ hybridization), and/or as primers for reverse transcription-PCR (RT-PCR).

[0438] In some embodiments, nucleic acids can be DNA or RNA, and can be single stranded or double-stranded. In some embodiments, nucleic acids in accordance with the invention may include one or more non-natural nucleotides; in some embodiments, nucleic acids in accordance with the invention include only natural nucleotides.

### Antibodies to Polypeptides

[0439] The present invention provides antibodies to binding agent polypeptides in accordance with the invention (e.g., HA polypeptides). These may be monoclonal or polyclonal and may be prepared by any of a variety of techniques known to those of ordinary skill in the art (e.g., see Harlow and Lane, 1988, Antibodies: A Laboratory Manual, Cold Spring Harbor Laboratory; incorporated herein by reference). For example, antibodies can be produced by cell culture techniques, including the generation of monoclonal antibodies, or via transfection of antibody genes into suitable bacterial or mammalian cell hosts, in order to allow for the production of recombinant antibodies.

### Testing Binding Agents in Animal Models

[0440] The present invention provides methods for testing binding agents in accordance with the invention (e.g., HA polypeptides, LSBAs, USBAs, UTSBAs, etc.) in an animal host. As used herein, an “animal host” includes any animal model suitable for influenza research. For example, animal hosts suitable for the invention can be any mammalian hosts, including primates, ferrets, cats, dogs, cows, horses, rodents such as, mice, hamsters, rabbits, and rats. In some embodiments, an animal host used for the invention is a ferret. In particular, in some embodiments, an animal host is naïve to viral exposure or infection prior to administration of a binding agent in accordance with the invention (optionally in a composition in accordance with the invention). In some embodiments, the animal host is inoculated with, infected with, or otherwise exposed to virus prior to or concurrent with administration of a binding agent in accordance with the invention. An animal host used in the practice of the present invention can be innoculated with, infected with, or otherwise exposed to virus by any method known in the art. In some embodiments, an animal host may be innoculated with, infected with, or exposed to virus intranasally.

[0441] In some embodiments, a suitable animal host may have a similar distribution of umbrella vs. cone topology glycans and/or α2-6 glycans vs. α 2-3 glycans to the distribution found in the human respiratory tract. For example, it is contemplated that a ferret as an animal host may be more representative than a mouse when used as model of disease caused by influenza viruses in humans (Tumpey et al., 2007, Science 315; 655-59; incorporated herein by reference). Without wishing to be bound any theories, the present invention encompasses the idea that ferrets may have a more similar distribution of glycans in the respiratory tract to those in the human respiratory tract than mouse does to human.

Naïve and/or innoculated animals may be used for any of a variety of studies. For example, such animal models may be used for virus transmission studies as in known in the art. It is contemplated that the use of ferrets in virus transmission studies may serve as a reliable predictor for virus transmission in humans. For example, air transmission of viral influenza from innoculated animals (e.g., ferrets) to naïve animals is known in the art (Tumpey et al., 2007, Science 315; 655-59; incorporated herein by reference). Virus transmission studies may be used to test binding agent polypeptides in accordance with the invention (e.g., HA polypeptides). For example, binding agents in accordance with the invention may be administered to a suitable animal host before, during or after virus transmission studies in order to determine the efficacy of said binding agent in blocking virus binding and/or infectivity in the animal host. Using information gathered from virus transmission studies in an animal host, one may predict the efficacy of a binding agent in blocking virus binding and/or infectivity in a human host.

### Pharmaceutical Compositions

[0442] In some embodiments, the present invention provides for pharmaceutical compositions including binding agents in accordance with the invention (e.g., HA polypeptides, LSBAs, UTBAs, UTBSAs, etc.) and/or related entities. For example, in some embodiments, binding agent polypeptide(s) (e.g., HA polypeptides), nucleic acids encoding such polypeptides, characteristic or biologically active fragments of such polypeptides or nucleic acids, antibodies that bind to and/or compete with such polypeptides or fragments, small molecules that interact with or compete with such polypeptides or with glycans that bind to them, etc. are included in pharmaceutical compositions in accordance with the invention.

[0443] The invention encompasses treatment of influenza infections by administration of such pharmaceutical compositions in accordance with the invention. In some embodiments, pharmaceutical compositions in accordance with the invention are administered to a subject suffering from or susceptible to an influenza infection. In some embodiments, a subject is considered to be suffering from an influenza infection in the subject is displaying one or more symptoms commonly associated with influenza infection. In some embodiments, the subject is known or believed to have been exposed to the influenza virus. In some embodiments, a subject is considered to be susceptible to an influenza infection if the subject is known or believed to have been exposed to the influenza virus. In some embodiments, a subject is known or believed to have been exposed to the influenza virus if the subject has been in contact with other individuals known or suspected to have been infected with the influenza virus and/or if the subject is or has been present in a location in which influenza infection is known or thought to be prevalent.

[0444] In some embodiments, subjects suffering from or susceptible to influenza infection are tested for antibodies to binding agents in accordance with the invention prior to, during, or after administration of pharmaceutical compositions in accordance with the invention. In some embodiments, subjects having such antibodies are not administered pharmaceutical compositions comprising binding agents in accordance with the invention. In some embodiments, an appropriate dose of pharmaceutical composition and/or binding agent is selected based on detection (or lack thereof) of such antibodies.

[0445] In some embodiments, selection of a particular subject for treatment, particular binding agent or composition for administration, and/or particular dose or regimen for administration, is memorialized, for example in a written, printed, or electronic storage form.

[0446] Compositions in accordance with the invention may be administered prior to or after development of one or more symptoms of influenza infection.

[0447] The invention encompasses treatment of influenza infections by administration of compounds described herein. In some embodiments, treatment of influenza infections according to the present invention is accomplished by administration of a vaccine. To date, although significant accomplishments have been made in the development of influenza vaccines, there is room for further improvement. The present invention provides vaccines comprising binding agents in accordance with the invention (e.g., HA polypeptides, LSBAs, UTBAs, UTBSAs, etc.), and particularly comprising binding agents that bind to umbrella glycans (e.g., α2-6 linked umbrella glycans such as, for example, long α2-6 sialylated glycans).

[0448] To give but one example, attempts to generate vaccines specific for the H5N1 strain in humans have generally not been successful due, at least in part, to low immunogenicity of H5 HAs. In one study, a vaccine directed at the H5N1 strain was shown to yield antibody titers of 1:40, which is not a titer high enough to guarantee protection from infection. Furthermore, the dosage required to generate even a modest 1:40 antibody titer (two doses of 90 μg of purified killed virus or antigen) was 12-times that normally used in the case of the common seasonal influenza virus vaccine (Treanor et al., 2006, N Eng J Med, 354:1343; incorporated herein by reference). Other studies have similarly shown that current H5 vaccines are not highly immunogenic (Bresson et al., 2006, Lancet, 367:1657; incorporated herein by reference). In some embodiments, vaccines in accordance with the invention are formulated utilizing one or more strategies (see, for example, Enserink, 2005, Science, 309:996; incorporated herein by reference) intended to allow use of lower dose of H5 HA protein, and/or to achieve higher immunogenicity. For example, in some embodiments, multivalency is improved (e.g., via use of dendrimers); in some embodiments, one or more adjuvants is utilized, etc.

[0449] In some embodiments, the present invention provides for vaccines and the administration of these vaccines to a human subject. In some embodiments, vaccines are compositions comprising one or more of the following: (1) inactivated virus, (2) live attenuated influenza virus, for example, replication-defective virus, (3) binding agent in accordance with the invention (e.g., HA polypeptides, LSBAs, UTBAs, UTBSAs, etc.), (4) nucleic acid encoding binding agent polypeptide (e.g., HA polypeptide) or characteristic or biologically active portion thereof, (5) DNA vector that encodes binding agent polypeptide in accordance with the invention (e.g., HA polypeptide) or characteristic or biologically active portion thereof, and/or (6) expression system, for example, cells expressing one or more influenza proteins to be used as antigens.

[0450] Thus, in some embodiments, the present invention provides inactivated flu vaccines. In some embodiments, inactivated flu vaccines comprise one of three types of antigen preparation: inactivated whole virus, sub-virions where purified virus particles are disrupted with detergents or other reagents to solubilize the lipid envelope (“split” vaccine) or purified HA polypeptide (“subunit” vaccine). In some embodiments, virus can be inactivated by treatment with formaldehyde, beta-propiolactone, ether, ether with detergent (such as TWEEN-80®), cetyl trimethyl ammonium bromide (CTAB) and Triton N101, sodium deoxycholate and tri(n-butyl) phosphate. Inactivation can occur after or prior to clarification of allantoic fluid (from virus produced in eggs); the virions are isolated and purified by centrifugation (Nicholson et al., eds., 1998, Textbook of Influenza, Blackwell Science, Malden, Mass.; incorporated herein by reference). To assess the potency of the vaccine, the single radial immunodiffusion (SRD) test can be used (Schild et al., 1975, Bull. World Health Organ., 52:43-50 & 223-31; Mostow et al., 1975, J. Clin. Microbiol., 2:531; both of which are incorporated herein by reference).

[0451] The present invention also provides live, attenuated flu vaccines, and methods for attenuation are well known in the art. In some embodiments, attenuation is achieved through the use of reverse genetics, such as site-directed mutagenesis.

[0452] In some embodiments, influenza virus for use in vaccines is grown in eggs, for example, in embryonated hen eggs, in which case the harvested material is allantoic fluid. Alternatively or additionally, influenza virus may be derived from any method using tissue culture to grow the virus. Suitable cell substrates for growing the virus include, for example, dog kidney cells such as MDCK or cells from a clone of MDCK, MDCK-like cells, monkey kidney cells such as AGMK cells including Vero cells, cultured epithelial cells as continuous cell lines, 293T cells, BK-21 cells, CV-1 cells, or any other mammalian cell type suitable for the production of influenza virus (including upper airway epithelial cells) for vaccine purposes, readily available from commercial sources (e.g., ATCC, Rockville, Md.). Suitable cell substrates also include human cells such as MRC-5 cells. Suitable cell substrates are not limited to cell lines; for example primary cells such as chicken embryo fibroblasts are also included.

[0453] In some embodiments, vaccines in accordance with the invention further comprise one or more adjuvants. For example, aluminum salts (Baylor et al., 2002, Vaccine, 20:S18; incorporated herein by reference) and monophosphoryl lipid A (MPL; Ribi et al., 1986, Immunology and Immunopharmacology of Bacterial Endotoxins, Plenum Publ. Corp., NY, p. 407; incorporated herein by reference) can be used as adjuvants in human vaccines. Alternatively or additionally, new compounds are currently being tested as adjuvants in human vaccines, such as MF59 (Chiron Corp. www.chiron.com/investors/pressreleases/2005/051028.html, CPG 7909 (Cooper et al., 2004, Vaccine, 22:3136; incorporated herein by reference), and saponins, such as QS21 (Ghochikyan et al., 2006, Vaccine, 24:2275; incorporated herein by reference).

[0454] Additionally, some adjuvants are known in the art to enhance the immunogenicity of influenza vaccines, such as poly[di(carboxylatophenoxy)phosphazene] (PCCP; Payne et al., 1998, Vaccine, 16:92; incorporated herein by reference), interferon-γ (Cao et al., 1992, Vaccine, 10:238; incorporated herein by reference), block copolymer P1205 (CRL1005; Katz et al., 2000, Vaccine, 18:2177; incorporated herein by reference), interleukin-2 (IL-2; Mbwuike et al., 1990, Vaccine, 8:347; incorporated herein by reference), and polymethyl methacrylate (PMMA; Kreuter et al., 1981, J. Pharm. Sci., 70:367; incorporated herein by reference).

[0455] In some embodiments, compositions in accordance with the invention, e.g., compositions of binding agents, do not include adjuvants (e.g., provided compositions are essentially free of adjuvants). In some embodiments, compositions in accordance with the invention do not include an alum adjuvant (e.g., provided compositions are essentially free of alum).

[0456] In addition to vaccines, the present invention provides other therapeutic compositions useful in the treatment of viral infections. In some embodiments, treatment is accomplished by administration of an agent that interferes with expression or activity of an HA polypeptide.

[0457] In some embodiments, the present invention provides pharmaceutical compositions comprising antibodies or other agents related to provided polypeptides. For example, the invention provides compositions containing antibodies recognize virus particles containing a particular HA polypeptide (e.g., an HA polypeptide that binds to umbrella glycans), nucleic acids (such as nucleic acid sequences complementary to HA sequences, which can be used for RNAi), glycans that compete for binding to HA receptors, small molecules or glycomimetics that compete the glycan-HA polypeptide interaction, or any combination thereof. In some embodiments, collections of different agents, having diverse structures are utilized. In some embodiments, therapeutic compositions comprise one or more multivalent agents. In some embodiments, treatment comprises urgent administration shortly after exposure or suspicion of exposure.

[0458] In some embodiments, any of the vaccines described herein offer broad cross-protection against different varieties of influenza viruses. For example, in some embodiments, vaccines described herein offer cross-protection against both avian and human-adapted H5 viruses. In some embodiments, any of the vaccines described herein offer cross-protection against any H5 influenza virus strain or variant. In some embodiments, any of the vaccines described herein offer cross-protection against any H2 influenza virus strain or variant. In some embodiments, any of the vaccines described herein offer cross-protection against any H1, H2, H3, H4, H5, H6, H7, H8, H9, H10, H11, H12, H13, H14, H15, or H16 influenza virus strain or variant.

[0459] In general, a pharmaceutical composition will include a therapeutic agent in addition to one or more inactive agents such as a sterile, biocompatible carrier including, but not limited to, sterile water, saline, buffered saline, or dextrose solution. Alternatively or additionally, the composition can contain any of a variety of additives, such as stabilizers, buffers, excipients (e.g., sugars, amino acids, etc.), or preservatives.

[0460] In some embodiments, the therapeutic agent present in a pharmaceutical composition in accordance with the invention will consist of one or more binding agents as described herein. In some embodiments, a pharmaceutical composition in accordance with the invention contains a binding agent (e.g., an HA polypeptide, LSBA, UTBA, UTSBA, etc.) that binds to umbrella topology glycans (and/or to umbrella topology glycan mimics). In some such embodiments, the composition in accordance with the invention is substantially free of related agents (e.g., of other HA polypeptides, etc.) that do not bind to umbrella-topology glycans. In some such embodiments, pharmaceutical compositions in accordance with the invention contains not more than 50%, 40%, 30%, 20%, 10%, 5%, or 1% of an agent that binds to HA receptor glycans other than umbrella topology glycans.

[0461] In some embodiments, a pharmaceutical composition will include a therapeutic agent that is encapsulated, trapped, or bound within a lipid vesicle, a bioavailable and/or biocompatible and/or biodegradable matrix, or other microparticle.

[0462] In some embodiments, a provided pharmaceutical composition will include a binding agent (e.g., an HA polypeptide, LSBA, UTBA, UTSBA, etc.) that is not aggregated. For example, in some embodiments, less than 1%, 2%, 5%, 10%, 20%, or 30%, by dry weight or number, of the binding agent is present in an aggregate.

[0463] In some embodiments, a provided pharmaceutical composition will include a binding agent (e.g., an HA polypeptide, LSBA, UTBA, UTSBA, etc.) that is not denatured. For example, in some embodiments, less than 1%, 2%, 5%, 10%, 20%, or 30%, by dry weight or number, of the UTSBA administered is denatured.

[0464] In some embodiments, a provided pharmaceutical composition will include a binding agent (e.g., an HA polypeptide, LSBA, UTBA, UTSBA, etc.) that is not inactive. For example, in some embodiments, less than 1%, 2%, 5%, 10%, 20%, or 30%, by dry weight or number, of the UTSBA administered is inactive.

[0465] In some embodiments, pharmaceutical compositions in accordance with the invention are formulated to reduce immunogenicity of provided binding agents. For example, in some embodiments, a provided binding agent is associated with (e.g., bound to) an agent, such as polyethylene glycol and/or carboxymethyl cellulose, that masks its immunogenicity. In some embodiments, a provided binding agent has additional glycosylation that reduces immunogenicity.

[0466] Pharmaceutical compositions of the present invention may be administered either alone or in combination with one or more other therapeutic agents including, but not limited to, vaccines and/or antibodies. By “in combination with,” it is not intended to imply that the agents must be administered at the same time or formulated for delivery together, although these methods of delivery are within the scope of the invention. In general, each agent will be administered at a dose and on a time schedule determined for that agent. Additionally, the invention encompasses the delivery of pharmaceutical compositions in accordance with the invention in combination with agents that may improve their bioavailability, reduce or modify their metabolism, inhibit their excretion, or modify their distribution within the body. Although the pharmaceutical compositions of the present invention can be used for treatment of any subject (e.g., any animal) in need thereof, they are most preferably used in the treatment of humans. In some embodiments, pharmaceutical compositions in accordance with the invention and/or binding agents are administered in combination with one or more of an anti-viral agent (e.g., Oseltamivir [TAMIFLU®], Zanamavir [RELEZA®], etc.) and/or a sialidase.

[0467] Pharmaceutical compositions of the present invention can be administered by a variety of routes, including oral, intravenous, intramuscular, intra-arterial, subcutaneous, intraventricular, transdermal, interdermal, rectal, intravaginal, intraperitoneal, topical (as by powders, ointments, creams, or drops), mucosal, nasal, buccal, enteral, sublingual; by intratracheal instillation, bronchial instillation, and/or inhalation; and/or as an oral spray, nasal spray, and/or aerosol. In general the most appropriate route of administration will depend upon a variety of factors including the nature of the agent (e.g., its stability in the environment of the gastrointestinal tract), the condition of the patient (e.g., whether the patient is able to tolerate oral administration), etc.

[0468] At present the oral or nasal spray or aerosol route (e.g., by inhalation) is most commonly used to deliver therapeutic agents directly to the lungs and respiratory system. However, the invention encompasses the delivery of the pharmaceutical composition in accordance with the invention by any appropriate route taking into consideration likely advances in the sciences of drug delivery.

[0469] In some embodiments, preparations for inhaled or aerosol delivery comprise a plurality of particles. In some embodiments, such preparations have a mean particle size of about 1, about 2, about 3, about 4, about 5, about 6, about 7, about 8, about 9, about 10, about 11, about 12, or about 13 microns. In some embodiments, preparations for inhaled or aerosol delivery are formulated as a dry powder. In some embodiments, preparations for inhaled or aerosol delivery are formulated as a wet powder, for example through inclusion of a wetting agent. In some embodiments, the wetting agent is selected from the group consisting of water, saline, or other liquid of physiological pH.

[0470] In some embodiments, compositions in accordance with the invention are administered as drops to the nasal or buccal cavity. In some embodiments, a dose may comprise a plurality of drops (e.g., 1-100, 1-50, 1-20, 1-10, 1-5, etc.)

[0471] In some embodiments, compositions in accordance with the invention are administered using a device that delivers a metered dosage of composition (e.g., of binding agent).

[0472] Suitable devices for use in delivering intradermal pharmaceutical compositions described herein include short needle devices such as those described in U.S. Pat. No. 4,886,499, U.S. Pat. No. 5,190,521, U.S. Pat. No. 5,328,483, U.S. Pat. No. 5,527,288, U.S. Pat. No. 4,270,537, U.S. Pat. No. 5,015,235, U.S. Pat. No. 5,141,496, U.S. Pat. No. 5,417,662 (all of which are incorporated herein by reference). Intradermal compositions may also be administered by devices which limit the effective penetration length of a needle into the skin, such as those described in WO99/34850, incorporated herein by reference, and functional equivalents thereof. Also suitable are jet injection devices which deliver liquid vaccines to the dermis via a liquid jet injector or via a needle which pierces the stratum corneum and produces a jet which reaches the dermis. Jet injection devices are described for example in U.S. Pat. No. 5,480,381, U.S. Pat. No. 5,599,302, U.S. Pat. No. 5,334,144, U.S. Pat. No. 5,993,412, U.S. Pat. No. 5,649,912, U.S. Pat. No. 5,569,189, U.S. Pat. No. 5,704,911, U.S. Pat. No. 5,383,851, U.S. Pat. No. 5,893,397, U.S. Pat. No. 5,466,220, U.S. Pat. No. 5,339,163, U.S. Pat. No. 5,312,335, U.S. Pat. No. 5,503,627, U.S. Pat. No. 5,064,413, U.S. Pat. No. 5,520,639, U.S. Pat. No. 4,596,556, U.S. Pat. No. 4,790,824, U.S. Pat. No. 4,941,880, U.S. Pat. No. 4,940,460, WO 97/37705, and WO 97/13537 (all of which are incorporated herein by reference). Also suitable are ballistic powder/particle delivery devices which use compressed gas to accelerate vaccine in powder form through the outer layers of the skin to the dermis. Additionally, conventional syringes may be used in the classical mantoux method of intradermal administration.

[0473] General considerations in the formulation and manufacture of pharmaceutical agents may be found, for example, in Remington's Pharmaceutical Sciences, 19^{th} ed., Mack Publishing Co., Easton, Pa., 1995; incorporated herein by reference.

[0474] Pharmaceutical compositions in accordance with the invention may be administered in any dose appropriate to achieve a desired outcome. In some embodiments, the desired outcome is reduction in intensity, severity, and/or frequency, and/or delay of onset of one or more symptoms of influenza infection.

[0475] In some embodiments, pharmaceutical compositions in accordance with the invention are formulated to administer a dose of binding agent effective to compete with influenza HA for binding to umbrella topology glycans. In some embodiments, such binding by influenza HA is reduced after administration of one or more doses of a composition in accordance with the invention as compared with its level absent such administration. In some embodiments, pharmaceutical compositions in accordance with the invention are formulated to administer a dose of binding agent effective to saturate at least 10%, at least 15%, at least 20%, at least 25%, at least 30%, at least 35%, at least 40%, at least 45%, at least 50%, at least 55%, at least 60%, at least 65%, at least 70%, at least 75%, at least 80%, at least 85%, at least 90%, at least 91%, at least 92%, at least 93%, at least 94%, at least 95%, at least 96%, at least 97%, at least 98%, at least 99%, or more HA binding sites (e.g., HA binding sites containing umbrella topology glycans) present in the subject (e.g., in the respiratory tract of the subject) receiving the composition.

[0476] In some embodiments, pharmaceutical compositions in accordance with the invention are formulated to deliver a unit dose of binding agent within the range of 0.0001 to 1000 mg/kg.

[0477] In some embodiments, pharmaceutical compositions in accordance with the invention are administered in multiple doses. In some embodiments, pharmaceutical compositions in accordance with the invention are administered in multiple doses/day. In some embodiments, pharmaceutical compositions in accordance with the invention are administered according to a continuous dosing regimen, such that the subject does not undergo periods of less than therapeutic dosing interposed between periods of therapeutic dosing. In some embodiments, pharmaceutical compositions in accordance with the invention are administered according to an intermittent dosing regimen, such that the subject undergoes at least one period of less than therapeutic dosing interposed between two periods of therapeutic dosing.

### Diagnostics/Kits

[0478] The present invention provides kits for detecting binding agents (e.g., HA polypeptides, LSBAs, UTBAs, UTSBAs, etc), and particular for detecting binding agents with particular glycan binding characteristics (e.g., binding to umbrella glycans, to α2-6 sialylated glycans, to long α2-6 sialylated glycans, etc.) in pathological samples, including, but not limited to, blood, serum/plasma, peripheral blood mononuclear cells/peripheral blood lymphocytes (PBMC/PBL), sputum, urine, feces, throat swabs, dermal lesion swabs, cerebrospinal fluids, cervical smears, pus samples, food matrices, and tissues from various parts of the body such as brain, spleen, and liver. The present invention also provides kits for detecting binding agents (e.g., HA polypeptides, LSBAs, UTBAs, UTSBAs, etc) of interest in environmental samples, including, but not limited to, soil, water, and flora. Other samples that have not been listed may also be applicable.

[0479] In some embodiments, the present invention provides kits for detecting HA polypeptides as described herein whether or not such polypeptides are binding agents.

[0480] In some embodiments, kits in accordance with the invention may include one or more agents that specifically detect binding agents (e.g., HA polypeptides, LSBAs, UTBAs, UTSBAs, etc) with particular glycan binding characteristics. Such detecting agents may include, for example, antibodies that specifically recognize certain binding agents (e.g., binding agents that bind to umbrella glycans and/or to α2-6 sialylated glycans and/or to long α2-6 sialylated glycans), which can be used to specifically detect such binding agents by ELISA, immunofluorescence, and/or immunoblotting.

[0481] Antibodies that bind to HA polypeptides can also be used in virus neutralization tests, in which a sample is treated with antibody specific to HA polypeptides of interest, and tested for its ability to infect cultured cells relative to untreated sample. If the virus in that sample contains such HA polypeptides, the antibody will neutralize the virus and prevent it from infecting the cultured cells. Alternatively or additionally, such antibodies can also be used in HA-inhibition tests, in which the HA protein is isolated from a given sample, treated with antibody specific to a particular HA polypeptide or set of HA polypeptides, and tested for its ability to agglutinate erythrocytes relative to untreated sample. If the virus in the sample contains such an HA polypeptide, the antibody will neutralize the activity of the HA polypeptide and prevent it from agglutinating erythrocytes (Harlow & Lane, 1988, Antibodies: A Laboratory Manual, CSHL Press; www.who.int/cseresources/publications/influenza/WHO_CDS_CSR_NCS_{—}2002_{—}5/en/index.ht ml; www.who.int/csr/disease/avian_influenza/guidelines/labtests/en/index.html). In some embodiments, such agents may include nucleic acids that specifically bind to nucleotides that encode particular HA polypeptides and that can be used to specifically detect such HA polypeptides by RT-PCR or in situ hybridization (www.who.int/csr/resources/publications/influenza/WHO_CDS_CSR_NCS_{—}2002_{—}5/en/index.ht ml; www.who.int/csr/disease/avian_influenza/guidelines/labtests/en/index.html). In some embodiments, nucleic acids which have been isolated from a sample are amplified prior to detection. In some embodiments, diagnostic reagents can be detectably labeled.

[0482] The present invention also provides kits containing reagents according to the invention for the generation of influenza viruses and vaccines. Contents of the kits include, but are not limited to, expression plasmids containing HA nucleotides (or characteristic or biologically active portions) encoding HA polypeptides of interest (or characteristic or biologically active portions). Alternatively or additionally, kits may contain expression plasmids that express HA polypeptides of interest (or characteristic or biologically active portions). Expression plasmids containing no virus genes may also be included so that users are capable of incorporating HA nucleotides from any influenza virus of interest. Mammalian cell lines may also be included with the kits, including but not limited to, Vero and MDCK cell lines. In some embodiments, diagnostic reagents can be detectably labeled.

[0483] In some embodiments, kits for use in accordance with the present invention may include, a reference sample, instructions for processing samples, performing the test, instructions for interpreting the results, buffers and/or other reagents necessary for performing the test. In some embodiments the kit can comprise a panel of antibodies.

[0484] In some embodiments of the present invention, glycan arrays, as discussed above, may be utilized as diagnostics and/or kits.

[0485] In some embodiments, glycan arrays and/or kits in accordance with the invention are used to perform dose response studies to assess binding of HA polypeptides to umbrella glycans at multiple doses (e.g., as described herein). Such studies give particularly valuable insight into the binding characteristics of tested HA polypeptides, and are particularly useful to assess specific binding. Dose response binding studies of this type find many useful applications. To give but one example, they can be helpful in tracking the evolution of binding characteristics in a related series of HA polypeptide variants, whether the series is generated through natural evolution, intentional engineering, or a combination of the two.

[0486] In some embodiments, glycan arrays and/or kits in accordance with the invention are used to induce, identify, and/or select binding agents (e.g., HA polypeptides, and/or HA polypeptide variants) having desired binding characteristics. For instance, in some embodiments, glycan arrays and/or kits in accordance with the invention are used to exert evolutionary (e.g., screening and/or selection) pressure on a population of polypeptide binding agents (e.g., HA polypeptides).

[0487] The present invention provides kits for administration of pharmaceutical compositions in accordance with the invention. For example, in some embodiments, the invention provides a kit comprising at least one dose of a binding agent. In some embodiments, the invention provides a kit comprising an initial unit dose and a subsequent unit dose of a binding agent. In some such embodiments, the initial unit dose is greater than the subsequent unit dose or wherein the two doses are equal.

[0488] In some embodiments, kits in accordance with the invention (particularly those for administration of pharmaceutical compositions in accordance with the invention) comprise at least one component of a delivery device, e.g., an inhaler. In some such embodiments, the invention provides a kit comprising at least one component of a delivery device, e.g., an inhaler and a dose of a binding agent.

[0489] In some embodiments, provided kits comprise instructions for use.

### EXEMPLIFICATION

### Example 1

### Identification of Molecular Determinants of Broad Spectrum Human Binding HA Polypeptides

[0490] Introduction

[0491] The H5N1 avian influenza virus (“bird flu” or “avian flu”) is a highly infectious and deadly pathogen. Since 1996, several H5N1 outbreaks have occurred across three continents killing millions of poultry. Since its emergence, the virus has also shown potential to infect humans with a mortality rate exceeding 60%. Humans have virtually no immunity to the H5N1 virus, but this virus has not yet adapted to the human host to be able to efficiently infect and transmit between humans. The virus would acquire mutations that allow it to gain a foothold in the human population.

[0492] Hemagglutinin (HA), the surface glycoprotein of influenza A virus, is responsible for initiating viral entry into the host cell. HA binds to sialylated glycan receptors (complex glycans terminated by α2→3 or α2→6-linked sialic acid). The H5N1 HA preferentially binds to glycan receptors terminated by α2→3 linked sialic acid. The present inventors have demonstrated that the glycan receptors in the human host for human-adapted influenza A viruses are α2→6 sialylated glycans that adopt a characteristic umbrella-like topology (referred to henceforth as human receptors) in the glycan receptor-binding site (RBS) of HA (Chandrasekharan et al., 2008, Nat Biotech, 26:107; incorporated herein by reference). The present inventors have also shown that high affinity binding to these human glycan receptors is a characteristic of human adapted HA and correlates with the efficient airborne transmissibility of the human-adapted H1N1 and H3N2 viruses (Chandrasekharan et al., 2008, Nat Biotech, 26:107; Srinivasan et al., 2008, PNAS, 105: 2800; both of which are incorporated herein by reference. In the present study, the present inventors have provided an H5N1 virus in which HA has sequence substitutions in the RBS that allow it to bind with high affinity to human receptors.

[0493] Experimental Design

[0494] Influenza HA is a homotrimeric protein, wherein a monomer contains 552 amino acids. Each monomer is composed of two disulphide-linked moieties, HA1 and HA2. HA1 comprises the glycan-receptor binding site (RBS), whereas HA2 is involved in the fusion of the viral and cellular membranes. The RBS pocket involves HA positions 95, 131, 133, 136, 137, 138, 145, 153, 155, 156, 158, 159, 183, 186, 187, 189, 190, 192, 193, 194, 195, 196, 219, 222, 224, 225, 226, 227, 228 (H3 numbering used).

[0495] The present inventors have conducted a detailed analysis of molecular contacts between H5N1 and a representative human receptor and have compared these contacts with those between the human-adapted pandemic H1N1, H2N2 and H3N2 HAs and human receptors. Through this approach, the present inventors have defined strategies for generating mutant forms of H5N1 HA. The mutations Q226L and G228S (or LS) have been introduced across several genetic clades of H5N1 HA. These mutations are based on the characteristic amino acid substitutions at the 226 and 228 positions of H2N2 and H3N2 HAs that have led to their human adaptation, respectively.

[0496] These mutations have been introduced in the context of the RBS of different genetic clades of H5N1 HA (FIG. 13). Previous studies (e.g., Stevens et al., 2008, J. Mol. Biol., 381:1382-94; and Stevens et al., 2006, Science, 312:404; both of which are incorporated herein by reference) have analyzed both recombinant HA and whole viruses comprising the LS mutations in different H5N1 strains on glycan array platforms and have shown that some of these strains have acquired binding to α2→6 sialylated glycans (FIG. 14). However, the goal of these studies was to screen for binding at high protein concentration or viral titers to determine how many α2→3 or α2→6 glycans showed binding signals.

[0497] In contrast, the present inventors performed a dose-dependent analysis on recombinant HAs carrying the LS mutation in the RBS from several H5N1 strains (FIG. 15). The present data demonstrate that none of these mutants showed the characteristic high binding affinity to human receptors that is shared by human-adapted HAs. The present results also correlated with the inefficient transmission of H5N1 viruses carrying just the LS mutation in the RBS. However, none of these mutants showed high affinity human receptor binding. Therefore additional strategies were needed to define mutant forms of H5N1 HA.

[0498] Mutations that Abrogate Glvcosvlation

[0499] Thus, the present inventors introduced 5 amino acid substitutions at 128, 133, 145, 159, 193 (bold and underlined residues below) into the Viet_{—}1203_{—}04_c1 (A/Viet Nam/1203/04 which is a clade 1 strain) HA in order to make its RBS similar to that of the more recent genetic clades (which includes strains such as A/Indonesia/5/05).

[0500] The present inventors recognized that glycosylation at amino acid position N158 might interfere with the umbrella-like topology of human receptor in the RBS of H5N1 HA. Thus, the inventors' first strategy involved generating mutant forms of H5N1 HA that contained Q228L and/or G228S substitutions and an additional T160A mutation that abrogates glycosylation at N158.

[0501] This glycosylation site is not conserved across all genetic clades. If the absence of glycosylation at N158 improves human receptor binding of H5N1 HA with LS mutations, then the LS mutations alone might suffice to achieve human adaptation of viruses belonging to genetic clades that naturally lack this glycosylation site (c2.2, c2.2.1, etc.; see FIG. 13). The template sequence for these clades was chosen as Egypt_{—}2876-N3_{—}06_c2.2 (A/Egypt/2786-N3/06 belonging to clade 2.2). The present inventors have also defined mutant forms that carry the Q226L mutation alone (in the context of deglycosylation at 158 position) to check the extent of improvement of the human receptor binding affinity, given that in H2 HA, the Q226L mutation is sufficient to substantially improve the affinity.

[0502] Dose-dependent analysis of the above mutants (FIG. 16) showed that removing the glycosylation at Asn-158 by mutating Thr-160→Ala in the context of LS mutation substantially improves binding to human receptors. This was observed for both the T160A/Q226L/G228S mutant on Viet1203_{—}04_D as well as LS mutation on Egypt 2876-N3_{—}06_c2.2 HA. The present inventors further demonstrated that the Q226L mutation alone (without G228S) is not sufficient to provide the high human receptor-binding affinity in the context of the removal of glycosylation at N158. The present invention, however, encompasses the recognition that a mutation at Q226 (e.g., Q226L) alone might suffice to provide the high human receptor-binding affinity in the context of the removal of glycosylation at N158 in the context of some particular virus strains. The present invention also encompasses the recognition that a mutation at G228 (e.g., G228S) alone might suffice to provide the high human receptor-binding affinity in the context of the removal of glycosylation at N158 in the context of some particular virus strains. The present invention also encompasses the recognition that mutations at both Q226 and G228 (e.g., Q226L and G228S) might be required to provide the high human receptor-binding affinity in the context of the removal of glycosylation at N158 in the context of some particular virus strains.

[0503] In addition, the inventors discovered that binding of the above mutants to avian receptors (particularly to 3′SLN-LN-LN and 3′SLN-LN) was also quite high, which is not typical of human adapted HAs. For example, even in the case of the prototypic pandemic H2N2 HA (A/Albany/6/58) which showed both human and avian receptor binding, the human receptor binding affinity was orders of magnitude higher than that of avian receptor-binding affinity.

[0504] Amino Acid Deletion in the Loop Region

[0505] The present inventors have designed mutant forms of H5N1 HA such that the molecular contacts between its RBS and human receptor closely mimics that of contacts between human-adapted H2N2 HAs and human receptors. Based on the inventors' previous work in understanding the molecular composition of the RBS of H2N2 HA and how it governs glycan receptor specificity, the inventors first performed a detailed molecular comparison of the RBS of H5N1 HA with that of a prototypic human-adapted H2N2 HA from a 1957-58 pandemic strain (A/Albany/6//58 or Alb6_{—}58) (FIG. 17). In order to minimize the differences in the molecular composition of RBS between H5 HA and Alb6_{—}58 HA, the inventors generated a mutant on the Viet1203_{—}04_D template (“Viet1203_{—}04_D_H2RBS”; SEQ ID NO: 61) that comprised 13 amino acid substitutions at 131, 132, 133, 135, 137, 155, 188, 192, 193, 221, 226, 227, and 228, and a deletion at 130. The present study, for the very first time, focuses on design and testing of mutations in the H5N1 HA RBS that represent a combination of deletion and substitutions based on a comprehensive comparison between H2 and H5 HA. The deletion was made at position 130. Although H2N2 HA lacks glycosylation at 158 position, the N158 glycosylation site (of Viet1203_{—}04_D) in the mutant HA was retained. Thus, the present invention encompasses the recognition that mutations that abrogate glycosylation at the 158 site in addition to the aforementioned mutations might enhance human binding even further. The present inventors also designed another version of this mutant (“Viet1203_{—}04_D_H2RBSmin”; SEQ ID NO: 63) with fewer mutations based on conservative substitutions.

[0506] The present inventors also searched for HA sequences from other H5N1 strains which might naturally be closer to Alb6_{—}58 H2N2 HA in terms of molecular composition of the RBS. The inventors identified two sets of exemplary templates: (1) with the switch in charge properties of positions 192 and 193 (A/chicken/Vietnam/NCVD-093/2008 or ckViet_{—}08), and (2) with a deletion in the 130 loop (A/chicken/Egypt/R2/2007 or ckEgy_{—}07). Additional mutant forms with fewer mutations in the above-mentioned positions on these new H5N1 HA templates were designed to make the H5N1 HA RBS mimic that of human-adapted H2N2 HA RBS.

[0507] Mutant human-receptor binding affinity using dose-dependent glycan array were tested. The Viet1203_{—}04_D_H2RBS mutant showed highly specific high affinity binding to human receptors that is characteristic of human adapted H1N1 and H2N2 HAs (FIG. 19). The present invention encompasses the recognition that additional mutations can be designed to understand the relationship between (1) the 130 loop composition and deletion, (2) switch in the charged residues at the 192 and 193 positions, and (3) glycosylation at 158 position and how this relationship governs the human receptor binding affinity of the mutant H5N1 HAs.

[0508] Exemplary Sequences of H5N1 Templates Used and Exemplary Mutant Polypeptides Designed in Accordance with the Above Principles and the Principles Set Forth in Example 2

[0509] An alignment of exemplary H5N1 templates and exemplary mutant H5 HA polypeptides designed in accordance with the above principles and the principles set forth in Example 2 are presented in FIG. 18 and below

(SEQ ID NO: 60)
Viet1203_04_D: bold, underlined residues denote substitution sites
MEKIVLLFAIVSLVKSDQICIGYHANNSTEQVDTIMEKNVTVTHAQDILEKKHNGKLCDLDGVK
PLILRDCSVAGWLLGNPMCDEFINVPEWSYIVEKANPVNDLCYPGDFNDYEELKHLLSRINHFE
KIQIIPKSSWSDHEASSGVSSACPYQGKPSFFRNVVWLIKKNNTYPTIKRSYNNTNQEDLLVLW
GIHHPNDAAEQTRLYQNPTTYISVGTSTLNQRLVPRIATRSKVNGQSGRMEFFWTILKPNDAIN
FESNGNFIAPEYAYKIVKKGDSTIMKSELEYGNCNTKCQTPMGAINSSMPFHNIHPLTIGECPK
YVKSNRLVLATGLRNSPQRERRRKKRGLFGAIAGFIEGGWQGMVDGWYGYHHSNEQGSGYAADK
ESTQKAIDGVTNKVNSIIDKMNTQFEAVGREFNNLERRIENLNKKMEDGFLDVWTYNAELLVLM
ENERTLDFHDSNVKNLYDKVRLQLRDNAKELGNGCFEFYHKCDNECMESVRNGTYDYPQYSEEA
RLKREEISGVKLESIGIYQILSIYSTVASSLALAIMVAGLSLWMCSNGSLQCRICI

[0510] In the following sequences, italics and highlighting denote the region where the mutations are made, and boldface and underlining indicate the residues that were mutated.

Viet1203_04_D_H2RBS:
(SEQ ID NO: 61)
MEKIVLLFAIVSLVKSDQICIGYHANNSTEQVDTIMEKNVTVTHAQDILEKKHNGKLCDLDGVK
PLILRDCSVAGWLLGNPMCDEFINVPEWSYIVEKANPVNDLCYPGDFNDYEELKHLLSRINHFE

[chemical structure]

[chemical structure]

FESNGNFIAPEYAYKIVKKGDSTIMKSELEYGNCNTKCQTPMGAINSSMPFHNIHPLTIGECPK
YVKSNRLVLATGLRNSPQRERRRKKRGLFGAIAGFIEGGWQGMVDGWYGYHHSNEQGSGYAADK
ESTQKAIDGVTNKVNSIIDKMNTQFEAVGREFNNLERRIENLNKKMEDGFLDVWTYNAELLVLM
ENERTLDFHDSNVKNLYDKVRLQLRDNAKELGNGCFEFYHKCDNECMESVRNGTYDYPQYSEEA
RLKREEISGVKLESIGIYQILSIYSTVASSLALAIMVAGLSLWMCSNGSLQCRICI
Viet1203_04_D_H2RBS_N158deglyc
(SEQ ID NO: 62)
MEKIVLLFAIVSLVKSDQICIGYHANNSTEQVDTIMEKNVTVTHAQDILEKKHNGKLCDLDGVK
PLILRDCSVAGWLLGNPMCDEFINVPEWSYIVEKANPVNDLCYPGDFNDYEELKHLLSRINHFE

[chemical structure]

[chemical structure]

FESNGNFIAPEYAYKIVKKGDSTIMKSELEYGNCNTKCQTPMGAINSSMPFHNIHPLTIGECPK
YVKSNRLVLATGLRNSPQRERRRKKRGLFGAIAGFIEGGWQGMVDGWYGYHHSNEQGSGYAADK
ESTQKAIDGVTNKVNSIIDKMNTQFEAVGREFNNLERRIENLNKKMEDGFLDVWTYNAELLVLM
ENERTLDFHDSNVKNLYDKVRLQLRDNAKELGNGCFEFYHKCDNECMESVRNGTYDYPQYSEEA
RLKREEISGVKLESIGIYQILSIYSTVASSLALAIMVAGLSLWMCSNGSLQCRICI
Viet1203_04_D_H2RBSmin): Deletion + 7 mutations
(SEQ ID NO: 63)
MEKIVLLFAIVSLVKSDQICIGYHANNSTEQVDTIMEKNVTVTHAQDILEKKHNGKLCDLDGVK
PLILRDCSVAGWLLGNPMCDEFINVPEWSYIVEKANPVNDLCYPGDFNDYEELKHLLSRINHFE

[chemical structure]

[chemical structure]

FESNGNFIAPEYAYKIVKKGDSTIMKSELEYGNCNTKCQTPMGAINSSMPFHNIHPLTIGECPK
YVKSNRLVLATGLRNSPQRERRRKKRGLFGAIAGFIEGGWQGMVDGWYGYHHSNEQGSGYAADK
ESTQKAIDGVTNKVNSIIDKMNTQFEAVGREFNNLERRIENLNKKMEDGFLDVWTYNAELLVLM
ENERTLDFHDSNVKNLYDKVRLQLRDNAKELGNGCFEFYHKCDNECMESVRNGTYDYPQYSEEA
RLKREEISGVKLESIGIYQILSIYSTVASSLALAIMVAGLSLWMCSNGSLQCRICI
Viet1203_04_D (T160A/Q226L/G228S) mutant:
(SEQ ID NO: 64)
MEKIVLLFAIVSLVKSDQICIGYHANNSTEQVDTIMEKNVTVTHAQDILEKKHNGKLCDLDGVK
PLILRDCSVAGWLLGNPMCDEFINVPEWSYIVEKANPVNDLCYPGDFNDYEELKHLLSRINHFE

[chemical structure]

[chemical structure]

FESNGNFIAPEYAYKIVKKGDSTIMKSELEYGNCNTKCQTPMGAINSSMPFHNIPLTIGECPK
YVKSNRLVLATGLRNSPQRERRRKKRGLFGAIAGFIEGGWQGMVDGWYGYHHSNEQGSGYAADK
ESTQKAIDGVTNKVNSIIDKMNTQFEAVGREFNNLERRIENLNKKMEDGFLDVWTYNAELLVLM
ENERTLDFHDSNVKNLYDKVRLQLRDNAKELGNGCFEFYHKCDNECMESVRNGTYDYPQYSEEA
RLKREEISGVKLESIGIYQILSIYSTVASSLALAIMVAGLSLWMCSNGSLQCRICI
Egypt_2876-N3_06_c2.2: Lack of glycosylation at 158 is indicated by larger font
(SEQ ID NO: 65)
MEKIVLLLAIVSLVKSDQICIGYHANNSTEQVDTIMEKNVTVTHAQDILEKTHNGKLCDLCGVK
PLILRDCSVAGWLLGNPMCDEFLNVPEWSYIVEKINPANDLCYPGNFNDYEELKHLLSRINHFE

[chemical structure]

WGIHHPNDAAEQTRLYQNPTTYISVGTSTLNQRLVPKIATRSKVNGQSGRMEFFWTILKSNDAI
NFESNGNFIAPENAYKIVKKGDSTIMKSELEYGNCNTKCQTPIGAINSSMPFHNIHPLTIGECP
KYVKSNRLVLATGLRNSPQGERRRKKRGLFGAIAGFIEGGWQGMVDGWYGYHHSNEQGSGYAAD
KESTQKAIDGVTNKVNSIIDKMNTQFEAVGREFNNLERRIENLNKKMEDGFLDVWTYNAELLVL
MENERTLDFHDSNVKNLYDKVRLQLRDNAKELGNGCFEFYHRCDNECMESVRNGTYDYPQYSEE
ARLKREEISGVKLESIGTYQILSIYSTVASSLALAIMVAGLFLWMCSNGSLQCRICI
Egypt_2876-N3_06_c2.2 HA with LS mutation: Lack of glycosylation at 158 is
indicated by larger font
(SEQ ID NO: 66)
MEKIVLLAIVSLVKSDQICIGYHANNSTEQVDTIMEKNVTVTHAQDILEKTHNGSKLCDLDGVK
PLILRDCSVAGWLLGNPMCDEFLNVPEWSYIVEKINPANDLCYPGNFNDYEELKHLLSRINHFE

[chemical structure]

WGIHHPNDAAEQTRLYQNPTTYISVGTSTLNQRLVPKIATRSKVNGLSSRMEFFWTILKSNDAI
NFESNGNFIAPENAYKIVKKGDSTIMKSELEYGNCNTKCQTPIGAINSSMPFHNIHPLTIGECP
KYVKSNRLVLATGLRNSPQGERRRKKRGLFGAIAGFIEGGWQGMVDGWYGYHHSNEQGSGYAAD
KESTQKAIDGVTNKVNSIIDKMNTQFEAVGREFNNLERRIENLNKKMEDGFLDVWTYNAELLVL
MENERTLDFHDSNVKNLYDKVRLQLRDNAKELGNGCFEFYHRCDNECMESVRNGTYDYPQYSEE
ARLKREEISGVKLESIGTYQILSIYSTVASSLALAIMVAGLFLWMCSNGSLQCRICI
Egypt_2876-N3_06_c2.2 HA with a single Q226L mutation: Lack of glycosylation
at 158 is indicated by larger font
(SEQ ID NO: 67)
MEKIVLLLAIVSLVKSDQICIGYHANNSTEQVDTIMEKNVTVTHAQDILEKTHNGKLCDLDGVK
PLILRDCSVAGWLLGNPMCDEFLNVPEWSYIVEKINPANDLCYPGNFNDYEELKHLLSRINHFE

[chemical structure]

WTIHHPNDAAEQTRLYQNPTTYISVGTSTLNQRLVPKIATRSKVNGLSGRMEFFWTILKSNDAI
NFESNGNFIAPENAYKIVKKGDSTIMKSELEYGNCNTKCQTPIGAINSSMPFHNIHPLTIGECP
KYVKSNRLVLATGLRNSPQGERRRKKRGLFGAIAGFIEGGWQGMVDGWYGYHHSNEQGSGYAAD
KESTQKAIDGVTNKVNSIIDKMNTQFEAVGREFNNLERRIENLNKKMEDGFLDVWTYNAELLVL
MENERTLDFHDSNVKNLYDKVRLQLRDNAKELGNGCFEFYHRCDNECMESVRNGTYDYPQYSEE
ARLKREEISGVKLESIGTYQILSIYSTVASSLALAIMVAGLFLWMCSNGSLQCRICI
Viet1203_04_D with T160A/Q226L double mutation:
(SEQ ID NO: 68)
MEKIVLLFAIVSLVKSDQICIGYHANNSTEQVDTIMEKNVTVTHAQDILEKKHNGKLCDLCGVK
PLILRDSVAGWLLGNPMCDEFINVPEWSYIVEKANPVNDLCYPGDFNDYEELKHLLSRINHFE
KIQIIPKSSWSDHEASSGVSSACPYQGKPSFFRNVVWLIKKNNAYPTIKRSYNNTNQEDLLVLW
GIHHPNDAAEQTRLYQNPTTYISVGTSTLNQRLVPRIATRSKVNGLSGRMEFFWTILKPNDAIN
FESNGNFIAPEYAYKIVKKGDSTIMKSELEYGNCNTKCQTPMGAINSSMPFHNIHPLTIGECPK
YVKSNRLVLATGLRNSPQRERRRKKRGLFGAIAGFIEGGWQGMVDGWYGYHHSNEQGSGYAADK
ESTQKAIDGVTNKVNSIIDKMNTQFEAVGREFNNLERRIENLNKKMEDGFLDVWTYNAELLVLM
ENERTLDFHDSNKNLYDKVRLQLRDNAKELGNGCFEFYHKCDNECMESVRNGTYDYPQYSEEA
RLKREEISGVKLESIGIYQILSIYSTVASSLALAIMVAGLSLWMCSNGSLQCRICI
cdViet_08: WT HA that already possesses the Lys192 and Met193 charge
combination as observed in H2N2 (indicated by larger font)
(SEQ ID NO: 69)
MEKIVLLLAIIGLVKSDQICVGYHANNSTEQVDTIMEKNITVTHAQDILEKTHNGKLCNLNGVK
PLILKDCSVAGWLLGNPMCDEFLNVSEWSYIVEKASPANGLCYPGDFNDYEELKHLLSRINHFE
KIKIIPKSYWSNHETSLGVSSACSYLENPSFFRNVVWLTKKNNTYPPIKVNYTNANQKDLLVLW

[chemical structure]

NFDSNGNFIAPEYAYKIVKKGDSAIMKSELEYGNCNTKCQTPIGAINSSMPFHNIHPLTIGECP
KYVKSNRLVLATCLRNAPQIEGRRRKRGLFGAIAGFIEGGWQGMVDGWYGYHHSNEQGSGYAAD
KESTQKAIDGITNKINSIIDKMNTQFEAVGREFNNLERRIENLNKKMEDGFLDVWTYNAELLVL
MENERTLDFHDSNVKNLYEKVRLQLRDNAKELGNGCFEFYHKCDNECMESVKNGTYDYPQYSEE
ARLNREEISGVKLESIVTYQILSIYSTVASSLALAIMVAGLSLWMCSNGSLQCRICI
cdViet_08_H2RBS: Deletion + 6 mutations
(SEQ ID NO: 70)
MEKIVLLLAIIGLVKSDQICVGYHANNSTEQVDTIMEKNITVTHAQDILEKTHNGKLCNLNGVK
PLILKDCSVAGWLLGNPMCDEFLNVSEWSYIVEKASPANGLCYPGDFNDYEELKHLLSRINHFE

[chemical structure]

[chemical structure]

NFDSNGNFIAPEYAYKIVKKGDSAIMKSELEYGNCNTKCQTPIGAINSSMPFHNIHPLTIGECP
KYVKSNRLVLATGLRNAPQIEGRRRKRGLFGAIAGFIEGGWQGMVDGWYGYHHSNEQGSGYAAD
KESTQKAIDGITNKINSIIDKMNTQFEAVGREFNNLERRIENLNKKMEDGFLDVWTYNAELLVL
MENERTLDFHDSNVKNLYEKVRLQLRDNAKELGNGCFEFYHKCDNECMESVKNGTYDYPQYSEE
ARLNREEISGVKLESIVTYQILSIYSTVASSLALAIMVAGLSLWMCSNGSLQCRICI
cdViet_08_H2RBS: Deletion + 5 mutations
(SEQ ID NO: 71)
MEKIVLLLAIIGLVKSDQICFGYHANNSTEQVDTIMEKNITVTHAQDILEKTHNGKLCNLNGVK
PLILKDCSVAGWLLGNPMCDEFLNVSEWSYIVEKASPANGLCYPGDFNDYEELKHLLSRINHFE

[chemical structure]

[chemical structure]

NFDSNGNFIAPEYAYKIVKKGDSAIMKSELEYGNCNTKCQTPIGAINSSMPFHNIHPLTIGECP
KYVKSNRLVLATGLRNAPQIEGRRRKRGLFGAIAGFIEGGWQGMVDGWYGYHHSNEQGSGYAAD
KESTQKAIDGITNKINSIIDKMNTQFEAVGREFNNLERRIENLNKKMEDGFLDWTYNAELLVL
MENERTLDFHDSNVKNLYEKVRLQLRDNAKELGNGCFEFYHKCDNECMESVKNGTYDYPQYSEE
ARLNREEISGVKLESIVTYQILSIYSTVASSLALAIMVAGLSLWMCSNGSLQCRICI
cdViet_08_H2RBSmin: Deletion + 4 mutations
(SEQ ID NO: 72)
MEKIVLLLAIIGLVKSDQICVGYHANNSTEQVDTIMEKNITVTHAQDILEKTHNGKLCNLNGVK
PLILKDCSVAGWLLGNPMCDEFLNVSEWSYIVEKASPANGLCYPGDFNDYEELKHLLSRINHFE

[chemical structure]

[chemical structure]

NFDSNGNFIAPEYAYKIVKKGDSAIMKSELEYGNCNTKCQTPIGAINSSMPFHNIHPLTIGECP
KYVKSNRLVLATGLRNAPQIEGRRRKRGLFGAIAGFIEGGWQGMVDGWYGYHHSNEQGSGYAAD
KESTQKAIDGITNKINSIIDKMNTQFEAVGREFNNLERRIENLNKKMEDGFLDVWTYNAELLVL
MENERTLDFHDSNVKNLYEKVRLQLRDNAKELGNGCFEFYHKCDNECMESVKNGTYDYPQYSEE
ARLNREEISGVKLESIVTYQILSIYSTVASSLALAIMVAGLSLWMCSNGSLQCRICI
cdEgy_07: Already possesses the deletion in the 130 loop
(SEQ ID NO: 73)
MEKIVLLLAIVSLVKSDQICIGYHANNSTEQVDTIMEKNVTVTHAQDILEKTHNGKLCNLDGVK
PLILRDCSVAGWLLGNPMCDEFLNVPEWSYIVEKINPANDLCYPGNFNDYEELKHLLSRINHFE
KIQIIPKNSWSDHEASGVSSACPYQGRSSFFRNVVWLTKKDNAYPTIKRSYNNTNQEDLLVLWG
IHHPNDAAEQTRLYQNPTTQISVGTSTLNQRLVPKIATRSKVNGQSGRMEFFWTILKSNDAINF
ESNGNFIAPENAYKIVKKGDSTIMKSELEYGNCNTKCQTPIGAINSSMPFHNIHPLTIGECPDY
VKSNRLVLATGLRNSPQGERRRKRRGLFGAIAGFIEGGWQGMVDGWYGYHHSNEQGSGYAADKE
STQKAIDGVTNKVNSIIDKMNTQFEAVGREFNNLERRIENLNKKMEDGFLDVWTYNAELLVLME
NERTLDFHDSNVKNLYDKVRLQLLRDNAKELGNGCFEFYHRCDNECMESVRNGTYDYQYSEEAR
LKREEISGVKLESIGTYQILSIYSTVASSLALAIMVAGLFLWMCSNGSLQCRICI
cdEgy_07_LS: LS mutation on cdEgy_07
(SEQ ID NO: 74)
MEKIVLLLAIVSLVKSDQICIGYHANNSTEQVDTIMEKNVTVTHAQDILEKTHNGKLCNLDGVK
PLILRDCSVAGWLLGNPMCDEFLNVPEWSYIVEKINPANDLCYPGNFNDYEELKHLLSRINHFE
KIQIIPKNSWSDHEASGVSSACPYQGRSSFFRNVVWLTKKDNAYPTIKRSYNNTNOEDLLVLWG

[chemical structure]

ESNGNFIAPENAYKIVKKGDSTIMKSELEYGNCNTKCQTPIGAINSSMPFHNIHPLTIGECPDY
VKSNRLVLATGLRNSPQGERRRKRRGLFGAIAGFIEGGWQGMVDGWYGYHHSNEQGSGYAADKE
STQKAIDGVTNKVNSIIDKMNTQFEAVGREFNNLERRIENLNKKMEDGFLDWTYNAELLVLME
NERTLDFHDSNVKNLYDKVRLQLRDNAKELGNGCFEFYHRCDNECMESVRNGTYDYPQYSEEAR
LKREEISGVKLESIGTYQILSIYSTVASSLALAIMVAGLFLWMCSNGSLQCRICI
cdEgy_07_H2RBS: 8 mutations
(SEQ ID NO: 75)
MEKIVLLLAIVSLVKSDQICIGYHANNSTEQVDTIMEKNVTVTHAQDILEKTHNGKLCNLDGVK
PLILRDCSVAGWLLGNPMCDEFLNVPEWSYIVEKINPANDLCYPGNFNDYEELKHLLSRINHFE
KIQIIPKNSWSDHTASGVSRACPYQRSSFFRNVVWLTKKDNAYPTIKRSYNNTNQEDLLVLWG
IHHPNDEAEQRALYQNPTTQISVGTSTLNQRLVPKIATRSKVNGLGSRMEFFWTILKSNDAINF
ESNGNFIAPENAYKIVKKGDSTIMKSELEYGNCNTKCQTPIGAINSSMPFHNIHPLTIGECPKY
VKSNRLVLATGLRNSPQGERRRKRRGLFGAIAGFIEGGWQGMVDGWYGYHHSNEQGSGYAADKE
STQKAIDGVTNKVNSIIDKMNTQFEAVGREFNNLERRIENLNKKMEDGFLDVWTYNAELLVLME
NERTLDFHDSNVKNLYDKVRLQLRDNAKELGNGCFEFYHRCDNECMESVRNGTYDYPQYSEEAR
LKREEISGVKLESIGTYQILSIYSTVASSLALAIMVAGLFLWMCSNGSLQCRICI

[0511] Discussion

[0512] Several experimental studies have attempted to identify determinants of human receptor specificity of H5 HA. However, these studies focused on replacement of amino acids at the RBS sites directly without considering the influence of the neighboring positions. Further, no prior study has even considered insertions or deletions as possible determinants of host specificity. Structure-based investigations have also fallen short of identifying the key determinants of H5 HA mainly because the structural effects of a deletion cannot be accurately evaluated using in silico analysis. In contrast, the present inventors, for the first time, have recognized the importance of and have employed a sequence alignment approach to engineering proteins with novel properties. The present invention encompasses the recognition that a similar approach can be used for identifying determinants of host specificity of other HA subtypes that have shown potential to infect humans in recent years (H7, H9, etc.).

### Materials and Methods

### Dose Response Direct Binding of Wild Type HA Polypeptides to Glycans of Different Topology

[0513] Direct binding assays typically utilize glycan arrays in which defined glycan structures (e.g., monovalent or multivalent) are presented on a support (e.g., glass slides or well plates), often using a polymer backbone. In so-called “sequential” assays, trimeric HA polypeptide is bound to the array and then is detected, for example using labeled (e.g., with FITC or horse radish peroxidase) primary and secondary antibodies. In “multivalent” assays, trimeric HA is first complexed with primary and secondary antibodies (typically in a 4:2:1 HA:primary:secondary ratio), such that there are 12 glycan binding sites per pre-complexed HA, and is then contacted with the array. Binding assays are typically carried out over a range of HA concentrations, so that information is obtained regarding relative affinities for different glycans in the array.

[0514] For example, direct binding studies were performed with arrays having different glycans such as 3′SLN, 6′SLN, 3′SLN-LN, 6′SLN-LN, and 3′SLN-LN-LN, where LN represents Galβ1-4GlcNAc, 3′ represents Neu5Acα2-3, and 6′ represents Neu5Acα2-6). Specifically, biotinylated glycans (50 μl of 120 pmol/ml) were incubated overnight (in PBS at 4° C.) with a streptavidin-coated High Binding Capacity 384-well plate that was previously rinsed three times with PBS. The plate was then washed three times with PBS to remove excess glycan, and was used without further processing.

[0515] Appropriate amounts of His-tagged HA protein, primary antibody (mouse anti 6×His tag) and secondary antibody (HRP conjugated goat anti-mouse IgG) were incubated in a ratio of 4:2:1 HA:primary:secondary for 15 minutes on ice. The mixture (i.e., precomplexed HA) was then made up to a final volume of 250 μl with 1% BSA in PBS. 50 μl of the precomplexed HA was then added to the glycan-coated wells in the 384-well plate, and was incubated at room temperature for 2 hours. The wells were subsequently washed three times with PBS containing 0.05% TWEEN-20, and then three times with PBS. HRP activity was estimated using Amplex Red Peroxidase Kit (Invitrogen, CA) according to the manufacturer's instructions. Serial dilutions of HA precomplexes were studied. Appropriate negative (non-sialylated glycans) and background (no glycans or no HA) controls were included, and all assays were done in triplicate.

### Example 2

### Exemplary Human Binding H5 HA Polypeptide Variants

[0516] In some embodiments, HA polypeptides are H5 polypeptides. In some such embodiments, H5 polypeptides in accordance with the invention show binding (e.g., high affinity and/or specificity binding) to umbrella glycans. In some such embodiments, H5 polypeptides in accordance with the invention show either comparable (to umbrella topology binding) high affinity-binding to cone topology glycans or reduced binding (e.g., lower affinity and/or specificity relative to umbrella-topology glycans) to cone topology glycans.

[0517] In some embodiments, H5 HA polypeptides in accordance with the invention bind to receptors found on human upper respiratory epithelial cells. Furthermore, H5 HA polypeptides in accordance with the invention bind to a plurality of different α2-6 sialylated glycans. In some embodiments, H5 HA polypeptides bind to umbrella glycans.

[0518] In some embodiments, H5 HA polypeptides in accordance with the invention bind to HA receptors in the bronchus and/or trachea. In some embodiments, H5 HA polypeptides are not able to bind receptors in the deep lung, and in some embodiments, H5 HA polypeptides are able to bind receptors in the deep lung. In some embodiments, H5 HA polypeptides are not able to bind to α2-3 sialylated glycans, and in some embodiments H5 HA polypeptides are able to bind to α2-3 sialylated glycans.

[0519] In some embodiments, H5 HA polypeptides in accordance with the invention are variants of a parent H5 HA (e.g., an H5 HA found in a natural influenza isolate). For example, in some embodiments, H5 HA polypeptides in accordance with the invention have at least one amino acid substitution, as compared with wild type H5 HA, within or affecting the glycan binding site. In some embodiments, such substitutions are of amino acids that interact directly with bound glycan; in some embodiments, such substitutions are of amino acids that are one degree of separation removed from those that interact with bound glycan, in that the one degree of separation removed—amino acids either (1) interact with the direct-binding amino acids; (2) otherwise affect the ability of the direct-binding amino acids to interact with glycan, but do not interact directly with glycan themselves; or (3) otherwise affect the ability of the direct-binding amino acids to interact with glycan, and also interact directly with glycan themselves. H5 HA polypeptides in accordance with the invention contain substitutions of one or more direct-binding amino acids, one or more first degree of separation—amino acids, one or more second degree of separation—amino acids, or any combination of these. In some embodiments, H5 HA polypeptides in accordance with the invention may contain substitutions of one or more amino acids with even higher degrees of separation.

[0520] In some embodiments, H5 HA polypeptide variants in accordance with the invention have at least two, three, four, five or more amino acid substitutions as compared with wild type H5 HA; in some embodiments H5 HA polypeptide variants in accordance with the invention have two, three, or four amino acid substitutions. In some embodiments, all such amino acid substitutions are located within the glycan binding site.

[0521] In some embodiments, HA polypeptide variants in accordance with the invention contain one or more amino acid substitutions as described in any of U.S. Patent Publication Number 2009/0269342 and 2010/0004195, and in U.S. patent application Ser. No. 12/829,931, filed Jul. 2, 2010, entitled “COMPOSITIONS AND METHODS FOR DIAGNOSING AND/OR TREATING INFLUENZA INFECTION” (all of which are incorporated herein by reference).

[0522] In some embodiments, H5 HA polypeptide variants have sequence substitutions at positions corresponding to one or more of residues 95, 98, 128, 130, 131, 132, 133, 135, 136, 137, 138, 145, 153, 155, 156, 158, 159, 160, 183, 186, 187, 188, 189, 190, 192, 193, 194, 195, 196, 219, 221, 222, 224, 225, 226, 227, and 228. In some embodiments, H5 HA polypeptide variants have one or more amino acid substitutions relative to a wild type parent H5 HA at residues selected from the group consisting of residues 95, 98, 128, 130, 131, 132, 133, 135, 136, 137, 138, 145, 153, 155, 156, 158, 159, 160, 183, 186, 187, 188, 189, 190, 192, 193, 194, 195, 196, 219, 221, 222, 224, 225, 226, 227, and 228. In some embodiments, H5 HA polypeptide variants have one or more amino acid substitutions relative to a wild type parent H5 HA at any 1, 2, 3, 4, 5, 6, 7, 8, 9, 10, 11, 12, 13, 14, 15, 16, 17, 18, 19, 20, 21, 22, 23, 24, 25, 26, 27, 28, 29, 30, 31, 32, 33, 34, 35, 36, or 37 residues selected from the group consisting of residues 95, 98, 128, 130, 131, 132, 133, 135, 136, 137, 138, 145, 153, 155, 156, 158, 159, 160, 183, 186, 187, 188, 189, 190, 192, 193, 194, 195, 196, 219, 221, 222, 224, 225, 226, 227, and 228.

[0523] In some embodiments, H5 HA polypeptide variants have sequence substitutions that reduce or abolish glycosylation a site corresponding to position 158. In some embodiments, H5 HA polypeptide variants have sequence substitutions that affect and/or alter the identity and/or structure of the glycan linked to a site corresponding to position 158. In some embodiments, such a sequence substitution is a mutation at a site corresponding to position 158, e.g., Asn158Xaa, wherein Xaa is any amino acid other than Asn. In some embodiments, such a sequence substitution is a mutation at a site corresponding to position 160, e.g., Thr160Xaa, wherein Xaa is any amino acid other than Asn. In some embodiments, such a sequence substitution comprises the mutation Thr160Ala. In some embodiments, a sequence substitution that reduces, abolishes, affects, or alters glycosylation at a site corresponding to position 158 can make an H5 HA polypeptide more closely resemble (e.g., both structurally and functionally) an H2 HA polypeptide. In some embodiments, a mutation at a site corresponding to position 160 (e.g., Thr160Xaa, such as Thr160Ala) can make an H5 HA polypeptide more closely resemble (e.g., both structurally and functionally) an H2 HA polypeptide.

[0524] In some embodiments, an H5 HA polypeptide variant has one or more sequence substitutions relative to a wild type parent H5 HA at positions corresponding to one or more of residues 226, 228, and 160. In some embodiments, an H5 HA polypeptide variant has one or more sequence substitutions relative to a wild type parent H5 HA at positions corresponding to residues 226, 228, and 160. In some embodiments, an H5 HA polypeptide variant has one or more sequence substitutions relative to a wild type parent H5 HA at positions corresponding to residues 226 and 160. In some embodiments, an H5 HA polypeptide variant has one or more sequence substitutions relative to a wild type parent H5 HA at positions corresponding to residues 228 and 160. In some embodiments, an H5 HA polypeptide variant has one or more sequence substitutions relative to a wild type parent H5 HA at positions corresponding to residues 226 and 228.

[0525] In some embodiments, an H5 HA polypeptide variant has one or more sequence substitutions relative to a wild type parent H5 HA at positions corresponding to one or more of residues 226, 228, and 158. In some embodiments, an H5 HA polypeptide variant has one or more sequence substitutions relative to a wild type parent H5 HA at positions corresponding to residues 226, 228, and 158. In some embodiments, an H5 HA polypeptide variant has one or more sequence substitutions relative to a wild type parent H5 HA at positions corresponding to residues 226 and 158. In some embodiments, an H5 HA polypeptide variant has one or more sequence substitutions relative to a wild type parent H5 HA at positions corresponding to residues 228 and 158. In some embodiments, an H5 HA polypeptide variant has one or more sequence substitutions relative to a wild type parent H5 HA at positions corresponding to residues 226 and 228.

[0526] In some embodiments, an H5 HA polypeptide variant has one or more sequence substitutions that include a deletion in one or more of the loop regions of an HA polypeptide. In some embodiments, an H5 HA polypeptide variant has one or more sequence substitutions that include a deletion at a site corresponding to the 128-137 loop region of an HA polypeptide. In some embodiments, an H5 HA polypeptide variant has one or more sequence substitutions that include a deletion at one or more of amino acid positions corresponding to residues 128, 129, 130, 131, 132, 133, 134, 135, 136, and/or 137 of an HA polypeptide. In some embodiments, an H5 HA polypeptide variant has one or more sequence substitutions that include a deletion at a site corresponding to the 128-134 loop region of an HA polypeptide. In some embodiments, an H5 HA polypeptide variant has one or more sequence substitutions that include a deletion at one or more of amino acid positions corresponding to residues 128, 129, 130, 131, 132, 133, and/or 134 of an HA polypeptide. In some embodiments, an H5 HA polypeptide variant has one or more sequence substitutions that include a deletion of an amino acid corresponding to residue 130. In some embodiments, such loop region substitutions can make an H5 HA polypeptide more closely resemble (e.g., both structurally and functionally) an H2 HA polypeptide. In some embodiments, a deletion of an amino acid corresponding to residue 130 can make an H5 HA polypeptide more closely resemble (e.g., both structurally and functionally) an H2 HA polypeptide.

[0527] In some embodiments, an H5 HA polypeptide variant has one or more sequence substitutions relative to a wild type parent HA at positions corresponding to one or more of residues 131, 132, 133, 135, 137, 155, 188, 192, 193, 221, 226, 227, 228, and 130. In some embodiments, an H5 HA polypeptide variant has one or more sequence substitutions relative to a wild type parent HA at positions corresponding to any 1, 2, 3, 4, 5, 6, 7, 8, 9, 10, 11, 12, 13, or 14 of residues 131, 132, 133, 135, 137, 155, 188, 192, 193, 221, 226, 227, 228, and 130. In some embodiments, an H5 HA polypeptide variant has one or more sequence substitutions relative to a wild type parent HA at positions corresponding to (1) 130, and (2) one or more of residues 131, 132, 133, 135, 137, 155, 188, 192, 193, 221, 226, 227, and 228. In some embodiments, an H5 HA polypeptide variant has one or more sequence substitutions relative to a wild type parent HA at positions corresponding to (1) 130, and (2) any 1, 2, 3, 4, 5, 6, 7, 8, 9, 10, 11, 12, or 13 of residues 131, 132, 133, 135, 137, 155, 188, 192, 193, 221, 226, 227, and 228.

[0528] In some embodiments, an H5 HA polypeptide variant has one or more sequence substitutions relative to a wild type parent HA at positions corresponding to one or more of residues 131, 132, 135, 188, 192, 221, and 130. In some embodiments, an H5 HA polypeptide variant has one or more sequence substitutions relative to a wild type parent HA at positions corresponding to any 1, 2, 3, 4, 5, 6, or 7 of residues 131, 132, 135, 188, 192, 221, and 130. In some embodiments, an H5 HA polypeptide variant has one or more sequence substitutions relative to a wild type parent HA at positions corresponding to (1) 130, and (2) one or more of residues 131, 132, 135, 188, 192, and 221. In some embodiments, an H5 HA polypeptide variant has one or more sequence substitutions relative to a wild type parent HA at positions corresponding to (1) 130, and (2) any 1, 2, 3, 4, 5, or 6 of residues 131, 132, 135, 188, 192, and 221.

[0529] In some embodiments, an H5 HA polypeptide variant has one or more sequence substitutions relative to a wild type parent HA at positions corresponding to one or more of residues 133, 137, 155, 193, 226, 227, 228, and 130. In some embodiments, an H5 HA polypeptide variant has one or more sequence substitutions relative to a wild type parent HA at positions corresponding to any 1, 2, 3, 4, 5, 6, 7, or of residues 133, 137, 155, 193, 226, 227, 228, and 130. In some embodiments, an H5 HA polypeptide variant has one or more sequence substitutions relative to a wild type parent HA at positions corresponding to (1) 130, and (2) one or more of residues 133, 137, 155, 193, 226, 227, and 228. In some embodiments, an H5 HA polypeptide variant has one or more sequence substitutions relative to a wild type parent HA at positions corresponding to (1) 130, and (2) any 1, 2, 3, 4, 5, 6, or 7 of residues 133, 137, 155, 193, 226, 227, and 228.

[0530] In some embodiments, an H5 HA polypeptide variant has one or more sequence substitutions relative to a wild type parent HA at positions corresponding to one or more of residues 130, 192, and 193. In some embodiments, an H5 HA polypeptide variant has one or more sequence substitutions relative to a wild type parent HA at positions corresponding to any 1, 2, or 3 of residues 130, 192, 193. In some embodiments, an H5 HA polypeptide variant has one or more sequence substitutions relative to a wild type parent HA at positions corresponding to (1) 130, and (2) one or both of residues 192 and 193.

[0531] In some embodiments, an H5 HA polypeptide variant has one or more sequence substitutions relative to a wild type parent HA at positions corresponding to one or more of residues 131, 132, 133, 135, 137, 155, 158, 160, 188, 192, 193, 221, 226, 227, 228, and 130. In some embodiments, an H5 HA polypeptide variant has one or more sequence substitutions relative to a wild type parent HA at positions corresponding to any 1, 2, 3, 4, 5, 6, 7, 8, 9, 10, 11, 12, 13, 14, 15, or 16 of residues 131, 132, 133, 135, 137, 155, 158, 160, 188, 192, 193, 221, 226, 227, 228, and 130. In some embodiments, an H5 HA polypeptide variant has one or more sequence substitutions relative to a wild type parent HA at positions corresponding to (1) 130, and (2) one or more of residues 131, 132, 133, 135, 137, 155, 158, 160, 188, 192, 193, 221, 226, 227, and 228. In some embodiments, an H5 HA polypeptide variant has one or more sequence substitutions relative to a wild type parent HA at positions corresponding to (1) 130, and (2) any 1, 2, 3, 4, 5, 6, 7, 8, 9, 10, 11, 12, 13, 14, or 15 of residues 131, 132, 133, 135, 137, 155, 158, 160, 188, 192, 193, 221, 226, 227, and 228.

[0532] In some embodiments, an H5 HA polypeptide variant has one or more sequence substitutions relative to a wild type parent HA at positions corresponding to one or more of residues 137, 188, 192, 193, 226, 228, and 130. In some embodiments, an H5 HA polypeptide variant has one or more sequence substitutions relative to a wild type parent HA at positions corresponding to any 1, 2, 3, 4, 5, 6, or 7 of residues 137, 188, 192, 193, 226, 228, and 130. In some embodiments, an H5 HA polypeptide variant has one or more sequence substitutions relative to a wild type parent HA at positions corresponding to (1) 130, and (2) one or more of residues 137, 188, 192, 193, 226, and 228. In some embodiments, an H5 HA polypeptide variant has one or more sequence substitutions relative to a wild type parent HA at positions corresponding to (1) 130, and (2) any 1, 2, 3, 4, 5, or 6 of residues 137, 188, 192, 193, 226, and 228.

[0533] In some embodiments, an H5 HA polypeptide variant has one or more sequence substitutions relative to a wild type parent HA at positions corresponding to one or more of residues 137, 188, 192, 193, 226, 227, 228, 131, 132, 133, and 130. In some embodiments, an H5 HA polypeptide variant has one or more sequence substitutions relative to a wild type parent HA at positions corresponding to any 1, 2, 3, 4, 5, 6, 7, 8, 9, 10, or 11 of residues 137, 188, 192, 193, 226, 227, 228, 131, 132, 133, and 130. In some embodiments, an H5 HA polypeptide variant has one or more sequence substitutions relative to a wild type parent HA at positions corresponding to (1) 130, and (2) one or more of residues 137, 188, 192, 193, 226, 227, 228, 131, 132, and 133. In some embodiments, an H5 HA polypeptide variant has one or more sequence substitutions relative to a wild type parent HA at positions corresponding to (1) 130, and (2) any 1, 2, 3, 4, 5, 6, 7, 8, 9, or 10 of residues 137, 188, 192, 193, 226, 227, 228, 131, 132, and 133.

[0534] In some embodiments, an H5 HA polypeptide variant has one or more sequence substitutions relative to a wild type parent HA at positions corresponding to one or more of residues 227, 131, 132, 133, and 130. In some embodiments, an H5 HA polypeptide variant has one or more sequence substitutions relative to a wild type parent HA at positions corresponding to any 1, 2, 3, 4, or 5 of residues 227, 131, 132, 133, and 130. In some embodiments, an H5 HA polypeptide variant has one or more sequence substitutions relative to a wild type parent HA at positions corresponding to (1) 130, and (2) one or more of residues 227, 131, 132, and 133. In some embodiments, an H5 HA polypeptide variant has one or more sequence substitutions relative to a wild type parent HA at positions corresponding to (1) 130, and (2) any 1, 2, 3, or 4 of residues 227, 131, 132, and 133.

[0535] In some embodiments, an H5 HA polypeptide variant has one or more sequence substitutions relative to a wild type parent HA at positions corresponding to one or more of residues 131, 133, 137, 155, 188, 192, 193, 226, 227, 228, and 130. In some embodiments, an H5 HA polypeptide variant has one or more sequence substitutions relative to a wild type parent HA at positions corresponding to any 1, 2, 3, 4, 5, 6, 7, 8, 9, 10, or 11 of residues 131, 133, 137, 155, 188, 192, 193, 226, 227, 228, and 130. In some embodiments, an H5 HA polypeptide variant has one or more sequence substitutions relative to a wild type parent HA at positions corresponding to (1) 130, and (2) one or more of residues 131, 133, 137, 155, 188, 192, 193, 226, 227, and 228. In some embodiments, an H5 HA polypeptide variant has one or more sequence substitutions relative to a wild type parent HA at positions corresponding to (1) 130, and (2) any 1, 2, 3, 4, 5, 6, 7, 8, 9, or 10 of residues 131, 133, 137, 155, 188, 192, 193, 226, 227, and 228.

[0536] In some embodiments, an H5 HA polypeptide variant has one or more sequence substitutions relative to a wild type parent HA at positions corresponding to one or more of residues 131, 133, 137, 155, 188, 192, 193, 226, 228, and 130. In some embodiments, an H5 HA polypeptide variant has one or more sequence substitutions relative to a wild type parent HA at positions corresponding to any 1, 2, 3, 4, 5, 6, 7, 8, 9, or 10 of residues 131, 133, 137, 155, 188, 192, 193, 226, 228, and 130. In some embodiments, an H5 HA polypeptide variant has one or more sequence substitutions relative to a wild type parent HA at positions corresponding to (1) 130, and (2) one or more of residues 131, 133, 137, 155, 188, 192, 193, 226, and 228. In some embodiments, an H5 HA polypeptide variant has one or more sequence substitutions relative to a wild type parent HA at positions corresponding to (1) 130, and (2) any 1, 2, 3, 4, 5, 6, 7, 8, or 9 of residues 131, 133, 137, 155, 188, 192, 193, 226, and 228.

[0537] In some embodiments, an H5 HA polypeptide variant has one or more sequence substitutions relative to a wild type parent HA at positions corresponding to one or more of residues 131, 133, 137, 155, 159, 160, 188, 192, 193, 226, 227, 228, and 130. In some embodiments, an H5 HA polypeptide variant has one or more sequence substitutions relative to a wild type parent HA at positions corresponding to any 1, 2, 3, 4, 5, 6, 7, 8, 9, 10, 11, 12, or 13 of residues 131, 133, 137, 155, 159, 160, 188, 192, 193, 226, 227, 228, and 130. In some embodiments, an H5 HA polypeptide variant has one or more sequence substitutions relative to a wild type parent HA at positions corresponding to (1) 130, and (2) one or more of residues 131, 133, 137, 155, 159, 160, 188, 192, 193, 226, 227, and 228. In some embodiments, an H5 HA polypeptide variant has one or more sequence substitutions relative to a wild type parent HA at positions corresponding to (1) 130, and (2) any 1, 2, 3, 4, 5, 6, 7, 8, 9, 10, 11, or 12 of residues 131, 133, 137, 155, 159, 160, 188, 192, 193, 226, 227, and 228.

[0538] In some embodiments, an H5 HA polypeptide variant has one or more sequence substitutions relative to a wild type parent HA at positions corresponding to one or more of residues 131, 133, 137, 155, 159, 160, 188, 192, 193, 226, 228, and 130. In some embodiments, an H5 HA polypeptide variant has one or more sequence substitutions relative to a wild type parent HA at positions corresponding to any 1, 2, 3, 4, 5, 6, 7, 8, 9, 10, 11, or 12 of residues 131, 133, 137, 155, 159, 160, 188, 192, 193, 226, 228, and 130. In some embodiments, an H5 HA polypeptide variant has one or more sequence substitutions relative to a wild type parent HA at positions corresponding to (1) 130, and (2) one or more of residues 131, 133, 137, 155, 159, 160, 188, 192, 193, 226, and 228. In some embodiments, an H5 HA polypeptide variant has one or more sequence substitutions relative to a wild type parent HA at positions corresponding to (1) 130, and (2) any 1, 2, 3, 4, 5, 6, 7, 8, 9, 10, or 11 of residues 131, 133, 137, 155, 159, 160, 188, 192, 193, 226, and 228.

[0539] In some embodiments, an H5 HA polypeptide variant has one or more sequence substitutions relative to a wild type parent HA at positions corresponding to one or more of residues 137, 188, 192, 193, 226, 228, 131, 132, 133, 221, 227, and 130. In some embodiments, an H5 HA polypeptide variant has one or more sequence substitutions relative to a wild type parent HA at positions corresponding to any 1, 2, 3, 4, 5, 6, 7, 8, 9, 10, 11, or 12 of residues 137, 188, 192, 193, 226, 228, 131, 132, 133, 221, 227, and 130. In some embodiments, an H5 HA polypeptide variant has one or more sequence substitutions relative to a wild type parent HA at positions corresponding to (1) 130, and (2) one or more of residues 137, 188, 192, 193, 226, 228, 131, 132, 133, 221, and 227. In some embodiments, an H5 HA polypeptide variant has one or more sequence substitutions relative to a wild type parent HA at positions corresponding to (1) 130, and (2) any 1, 2, 3, 4, 5, 6, 7, 8, 9, 10, or 11 of residues 137, 188, 192, 193, 226, 228, 131, 132, 133, 221, and 227.

[0540] In some embodiments, an H5 HA polypeptide variant has one or more sequence substitutions relative to a wild type parent HA at positions corresponding to one or more of residues 131, 132, 133, 221, 227, and 130. In some embodiments, an H5 HA polypeptide variant has one or more sequence substitutions relative to a wild type parent HA at positions corresponding to any 1, 2, 3, 4, 5, or 6 of residues 131, 132, 133, 221, 227, and 130. In some embodiments, an H5 HA polypeptide variant has one or more sequence substitutions relative to a wild type parent HA at positions corresponding to (1) 130, and (2) one or more of residues 131, 132, 133, 221, and 227. In some embodiments, HA polypeptide variants (e.g., H5 HA polypeptide variants) have sequence substitutions relative to a wild type parent HA at positions corresponding to (1) 130, and (2) any 1, 2, 3, 4, or 5 of residues 131, 132, 133, 221, and 227.

[0541] In some embodiments, a H5 HA polypeptide variant has one or more amino acid substitutions relative to a wild type parent H5 HA at residues selected from amino acids located in the region of the receptor that directly binds to the glycan, including but not limited to residues 98, 136, 153, 155, 183, and 194. In some embodiments, an H5 HA polypeptide variant has one or more amino acid substitutions relative to a wild type parent H5 HA at residues selected from amino acids located adjacent to the region of the receptor that directly binds the glycan, including but not limited to (a) residues 98 and 195, (b) residues 98, 138, 186, 187, 195, and 228), or (c) residues 138, 186, 187, and 228.

[0542] In some embodiments, an HA polypeptide variant, and particularly an H5 polypeptide variant has one or more amino acid substitutions relative to a wild type parent HA at residues selected from amino acids that are one degree of separation removed from those that interact with bound glycan, in that the one degree of separation removed—amino acids either (1) interact with the direct-binding amino acids; (2) otherwise affect the ability of the direct-binding amino acids to interact with glycan, but do not interact directly with glycan themselves; or (3) otherwise affect the ability of the direct-binding amino acids to interact with glycan, and also interact directly with glycan themselves, including but not limited to residues 98, 138, 186, 187, 195, and 228.

[0543] In some embodiments, an HA polypeptide variant, and particularly an H5 polypeptide variant, has one or more amino acid substitutions relative to a wild type parent HA at residues selected from amino acids that are one degree of separation removed from those that interact with bound glycan, in that the one degree of separation removed—amino acids either (1) interact with the direct-binding amino acids; (2) otherwise affect the ability of the direct-binding amino acids to interact with glycan, but do not interact directly with glycan themselves; or (3) otherwise affect the ability of the direct-binding amino acids to interact with glycan, and also interact directly with glycan themselves, including but not limited to residues 138, 186, 187, and 228.

[0544] In some embodiments, an HA polypeptide variant, and particularly an H5 polypeptide variant, has one or more amino acid substitutions relative to a wild type parent HA at residues selected from amino acids that are one degree of separation removed from those that interact with bound glycan, in that the one degree of separation removed—amino acids either (1) interact with the direct-binding amino acids; (2) otherwise affect the ability of the direct-binding amino acids to interact with glycan, but do not interact directly with glycan themselves; or (3) otherwise affect the ability of the direct-binding amino acids to interact with glycan, and also interact directly with glycan themselves, including but not limited to residues 98 and 195.

[0545] In some embodiments, an HA polypeptide variant, and particularly an H5 polypeptide variant, has an amino acid substitution relative to a wild type parent HA at residue 159.

[0546] In some embodiments, an HA polypeptide variant, and particularly an H5 polypeptide variant, has one or more amino acid substitutions relative to a wild type parent HA at residues selected from 190, 193, 225, and 226. In some embodiments, an HA polypeptide variant, and particularly an H5 polypeptide variant, has one or more amino acid substitutions relative to a wild type parent HA at residues selected from 190, 193, 226, and 228.

[0547] In some embodiments, a H5 HA polypeptide variant in accordance with the invention has one or more of the following amino acid substitutions: Ser132Thr, Ala133Thr, Ser133Thr, Ser137Ala, Ser137Arg, Ile155Thr, Lys156Glu, Asn158Xaa (wherein Xaa=any amino acid besides Asn), Thr160Ala, Asn186Pro, Asp187Ser, Asp187Thr, Ala188Glu, Ala188Asp, Ala189Gln, Ala189Lys, Ala189Thr, Glu190Asp, Glu190Thr, Thr192Arg/Lys, Lys193Arg, Lys193Asn, Lys193His, Lys193Ser, Lys/Arg193Thr/Ala/Met/Val, Ser221Pro, Gly225Asp, Gln226Ile, Gln226Leu, Gln226Val, Ser227Ala, Gly228Ser.

[0548] In some embodiments, an H5 HA polypeptide variant in accordance with the invention has an amino acid substitution at a position corresponding to residue 192, which switches the charge at that position. In some embodiments, an H5 HA polypeptide variant in accordance with the invention has an amino acid substitution at a position corresponding to residue 193, which switches the charge at that position. For example, in some embodiments, an H5 HA polypeptide in accordance with the invention has a Thr or a hydrophobic residue (e.g., Val or Ile) at a position corresponding to residue 192, and an H5 HA polypeptide variant (e.g., a human-adapted variant) has a hydrophilic residue at a position corresponding to residue 192. In some embodiments, an H5 HA polypeptide variant (e.g., a human-adapted variant) has a hydrophilic residue at a position corresponding to residue 192. To give another example, in some embodiments, an H5 HA polypeptide in accordance with the invention has a Thr or a hydrophobic residue (e.g., Val or Ile) at a position corresponding to residue 192, and an H5 HA polypeptide variant (e.g., a human-adapted variant) has a basic residue (e.g., Lys or Arg) at a position corresponding to residue 192. In some embodiments, an H5 HA polypeptide variant (e.g., a human-adapted variant) has a basic residue (e.g., Lys or Arg) at a position corresponding to residue 192. To give yet another example, in some embodiments, an H5 HA polypeptide in accordance with the invention has a basic residue (e.g., Lys or Arg) at a position corresponding to residue 193, and an H5 HA polypeptide variant (e.g., a human-adapted variant) has a neutral or acidic residue at a position corresponding to residue 193. In some embodiments, an H5 HA polypeptide variant (e.g., a human-adapted variant) has a neutral or acidic residue at a position corresponding to residue 193. In some embodiments, an H5 HA polypeptide variant (e.g., a human-adapted variant) has a Thr, Ala, Met, or Val at a position corresponding to residue 193.

[0549] In some embodiments, human adaptation of an H5 HA polypeptide is associated with the propert(ies) of the residue at position 188. In H5 HA, residue 188 is frequently Ala, which makes contacts with Thr or a hydrophobic residue at 192. In contrast, in H2 HA, residue 188 is frequently Glu or Asp, which makes contacts with Arg or Lys at 192. Hence, in some embodiments, an H5 HA polypeptide variant has a Glu at position 188. In some embodiments, an H5 HA polypeptide variant has an Asp at position 188. In some embodiments, an H5 HA polypeptide variant has an Ala188Glu substitution. In some embodiments, an H5 HA polypeptide variant has an Ala188Asp substitution.

[0550] In some embodiments, an H5 HA polypeptide has an Ala at a position corresponding to residue 188 and a Thr at a position corresponding to residue 192. In some embodiments, an H5 HA polypeptide has an Ala at a position corresponding to residue 188 and a hydrophobic residue at a position corresponding to residue 192. In some embodiments, an H5 HA polypeptide variant has a Glu at a position corresponding to residue 188 and an Arg at a position corresponding to residue 192. In some embodiments, an H5 HA polypeptide variant has an Asp at a position corresponding to residue 188 and an Arg at a position corresponding to residue 192. In some embodiments, an H5 HA polypeptide variant has a Glu at a position corresponding to residue 188 and a Lys at a position corresponding to residue 192. In some embodiments, an H5 HA polypeptide variant has an Asp at a position corresponding to residue 188 and a Lys at a position corresponding to residue 192.

[0551] In some embodiments, an H5 HA polypeptide has an Ala at a position corresponding to residue 188, a Thr at a position corresponding to residue 192, and a Lys at a position corresponding to residue 193. In some embodiments, an H5 HA polypeptide has an Ala at a position corresponding to residue 188, a hydrophobic residue at a position corresponding to residue 192, and a Lys at a position corresponding to residue 193. In some embodiments, an H5 HA polypeptide has an Ala at a position corresponding to residue 188, a Thr at a position corresponding to residue 192, and an Arg at a position corresponding to residue 193. In some embodiments, an H5 HA polypeptide has an Ala at a position corresponding to residue 188, a hydrophobic residue at a position corresponding to residue 192, and an Arg at a position corresponding to residue 193. In some embodiments, an H5 HA polypeptide variant has a Glu at a position corresponding to residue 188, an Arg at a position corresponding to residue 192, and a Thr at a position corresponding to residue 193. In some embodiments, an H5 HA polypeptide variant has an Asp at a position corresponding to residue 188, an Arg at a position corresponding to residue 192, and a Thr at a position corresponding to residue 193. In some embodiments, an H5 HA polypeptide variant has a Glu at a position corresponding to residue 188, a Lys at a position corresponding to residue 192, and a Thr at a position corresponding to residue 193. In some embodiments, an H5 HA polypeptide variant has an Asp at a position corresponding to residue 188, a Lys at a position corresponding to residue 192, and a Thr at a position corresponding to residue 193. In some embodiments, an H5 HA polypeptide variant has a Glu at a position corresponding to residue 188, an Arg at a position corresponding to residue 192, and a Thr, Ala, Met, or Val at a position corresponding to residue 193. In some embodiments, an H5 HA polypeptide variant has an Asp at a position corresponding to residue 188, an Arg at a position corresponding to residue 192, and a Thr, Ala, Met, or Val at a position corresponding to residue 193. In some embodiments, an H5 HA polypeptide variant has a Glu at a position corresponding to residue 188, a Lys at a position corresponding to residue 192, and a Thr, Ala, Met, or Val at a position corresponding to residue 193. In some embodiments, an H5 HA polypeptide variant has an Asp at a position corresponding to residue 188, a Lys at a position corresponding to residue 192, and a Thr, Ala, Met, or Val at a position corresponding to residue 193.

[0552] In some embodiments, an H5 HA polypeptide has an Ala at a position corresponding to residue 131. In some embodiments, an H5 HA polypeptide variant has a Thr at a position corresponding to residue 131.

[0553] In some embodiments, an H5 HA polypeptide has a Ser at a position corresponding to residue 132. In some embodiments, an H5 HA polypeptide variant has a Thr at a position corresponding to residue 132.

[0554] In some embodiments, an H5 HA polypeptide has a Ser at a position corresponding to residue 133. In some embodiments, an H5 HA polypeptide variant has a Thr at a position corresponding to residue 133.

[0555] In some embodiments, an H5 HA polypeptide includes Ala, Thr, and/or Ser at any position corresponding to residues 131, 132, and/or 133. In some embodiments, an H5 HA polypeptide variant includes Ala, Thr, and/or Ser at any position corresponding to residues 131, 132, and/or 133. In some embodiments, an H5 HA polypeptide variant includes Thr at all of positions corresponding to residues 131, 132, and 133.

[0556] In some embodiments, an H5 HA polypeptide has a Val at a position corresponding to residue 135. In some embodiments, an H5 HA polypeptide variant has any amino acid other than Val at a position corresponding to residue 135.

[0557] In some embodiments, an H5 HA polypeptide has a Ser at a position corresponding to residue 137. In some embodiments, an H5 HA polypeptide variant has an Arg at a position corresponding to residue 137.

[0558] In some embodiments, an H5 HA polypeptide has an Ile at a position corresponding to residue 155. In some embodiments, an H5 HA polypeptide variant has a Thr at a position corresponding to residue 155. In some embodiments, an H5 HA polypeptide includes a Thr at a position corresponding to residue 155. In some embodiments, an H5 HA polypeptide variant includes a Thr at a position corresponding to residue 155.

[0559] In some embodiments, an H5 HA polypeptide has a Ser at a position corresponding to residue 221. In some embodiments, an H5 HA polypeptide variant has a Pro at a position corresponding to residue 221.

[0560] In some embodiments, an H5 HA polypeptide includes a Ser at a position corresponding to residue 221. In some embodiments, an H5 HA polypeptide variant includes a Pro at a position corresponding to residue 221. Without wishing to be bound by any one particular theory, Pro221 might influence conformation of 220 loop which is involved with the RBS of H2 HA.

[0561] In some embodiments, an H5 HA polypeptide has a Gln at a position corresponding to residue 226. In some embodiments, an H5 HA polypeptide variant has a Leu at a position corresponding to residue 226.

[0562] In some embodiments, an H5 HA polypeptide has a Ser at a position corresponding to residue 227. In some embodiments, an H5 HA polypeptide variant has a Gly at a position corresponding to residue 227.

[0563] In some embodiments, an H5 HA polypeptide has a Gly at a position corresponding to residue 228. In some embodiments, an H5 HA polypeptide variant has a Ser at a position corresponding to residue 228.

[0564] In some embodiments, an H5 HA polypeptide includes Gln, Ser, and Gly residues at positions 226, 227, and 228, respectively. In some embodiments, an H5 HA polypeptide variant includes a Leu, Gly, and Ser at positions 226, 227, and 228, respectively.

[0565] In some embodiments, a H5 HA polypeptide variant in accordance with the invention has one or more of the following amino acids at the indicated positions:
[0566] Glu190Asp, Lys193Ser, Gly225Asp, Gln226Leu
[0567] Glu190Asp, Lys193Ser, Gln226Leu, Gly228Ser
[0568] Ala189Gln, Lys193Ser, Thr160Ala
[0569] Ala189Gln, Lys193Ser, Gln226Leu, Gly228Ser
[0570] Asp187Ser/Thr, Ala189Gln, Lys193Ser, Gln226Leu, Gly228Ser
[0571] Ala189Lys, Lys193Asn, Gln226Leu, Gly228Ser
[0572] Asp187Ser/Thr, Ala189Lys, Lys193Asn, Gln226Leu, Gly228Ser
[0573] Lys156Glu, Ala189Lys, Lys193Asn, Gln226Leu, Gly228Ser
[0574] Lys193His, Gln226Leu/Ile/Val, Gly228Ser
[0575] Lys193Arg, Gln226Leu/Ile/Val, Gly228Ser
[0576] Ala189Lys, Lys193Asn, Gly225Asp
[0577] Lys156Glu, Ala189Lys, Lys193Asn, Gly225Asp
[0578] Ser137Ala, Lys156Glu, Ala189Lys, Lys193Asn, Gly225Asp
[0579] Glu190Thr, Lys193Ser, Gly225Asp
[0580] Asp187Thr, Ala189Thr, Glu190Asp, Lys193Ser, Gly225Asp
[0581] Asn186Pro, Asp187Thr, Ala189Thr, Glu190Asp, Lys193Ser, Gly225Asp
[0582] Asn186Pro, Asp187Thr, Ala189Thr, Glu190Asp, Lys193Ser, Gly225Asp, Ser227Ala
[0583] Gln226Leu, Gly228Ser, Thr160Ala
[0584] Gln226Leu, Gly228Ser, Thr160Ala
[0585] Gly228Ser, Thr160Ala
[0586] Gln226Leu, Thr160Ala
[0587] Gln226Leu, Gly228Ser
[0588] Thr160Ala
[0589] Gln226Leu, Gly228Ser, Asn158Xaa (wherein Xaa=any amino acid besides Asn)
[0590] Gly228Ser, Asn158Xaa
[0591] Gln226Leu, Asn158Xaa
[0592] Gln226Leu, Gly228Ser
[0593] Asn158Xaa
[0594] Δ130 (wherein “Δ130” indicates a deletion at an amino acid corresponding to position 130) plus any possible combination of mutations at positions corresponding to 131, 132, 133, 135, 137, 155, 188, 192, 193, 221, 226, 227, and 228
[0595] Δ130 plus any possible combination of mutations at positions corresponding to 131, 132, 135, 188, 192, and 221
[0596] Δ130 plus any possible combination of mutations at positions corresponding to 133, 137, 155, 193, 226, 227, and 228
[0597] Δ130 plus any possible combination of mutations at positions corresponding to 131, 132, 133, 135, 137, 155, 158, 160, 188, 192, 193, 221, 226, 227, and 228
[0598] Δ130 plus any possible combination of mutations at positions corresponding to 131, 133, 137, 155, 188, 192, 193, 226, 227, and 228
[0599] Δ130 plus any possible combination of mutations at positions corresponding to 131, 133, 137, 155, 188, 192, 193, 226, and 228
[0600] Δ130 plus any possible combination of mutations at positions corresponding to 131, 133, 137, 155, 159, 160, 188, 192, 193, 226, 227, and 228
[0601] Δ130 plus any possible combination of mutations at positions corresponding to 131, 133, 137, 155, 159, 160, 188, 192, 193, 226, and 228
[0602] Δ130 plus any possible combination of mutations at positions corresponding to 137, 188, 192, 193, 226, 228, 131, 132, 133, 221, and 227
[0603] Δ130 plus any possible combination of mutations at positions corresponding to 131, 132, 133, 221, and 227
[0604] Δ130 plus any possible combination of mutations at positions corresponding to 137, 188, 192, 193, 226, and 228
[0605] Δ130 plus any possible combination of mutations at positions corresponding to 137, 188, 192, 193, 226, 227, 228, 131, 132, and 133
[0606] Δ130 plus any possible combination of mutations at positions corresponding to 227, 131, 132, and 133
[0607] Gln226Leu, Gly228Ser, Thr160Ala, Δ130
[0608] Gln226Leu, Gly228Ser, Δ130
[0609] Gln226Leu, Thr160Ala, Δ130
[0610] Gly228Ser, Thr160Ala, Δ130
[0611] Gln226Leu, Δ130
[0612] Gly228Ser, Δ130
[0613] Thr160Ala, Δ130
[0614] Δ130
[0615] Δ130, Ala131Thr, Leu133Thr, Ser137Arg, Ile155Thr, Ala188Glu, Thr/Ile192Arg/Lys, Arg/Lys193Thr/Ala, Gln226Leu, Ser227Gly, Gly228Ser
[0616] Δ130, Ala131Thr, Leu133Thr, Ser137Arg, Ile155Thr, Ala188Glu, Thr/Ile192Arg/Lys, Arg/Lys193Thr/Ala, Gln226Leu, Gly228Ser
[0617] Δ130, Ala131Thr, Leu133Thr, Ser137Arg, Ile155Thr, Asn159Asp (or Thr160Ala or both), Ala188Glu, Thr/Ile192Arg/Lys, Arg/Lys193Thr/Ala, Gln226Leu, Ser227Gly, Gly228Ser
[0618] Δ130, Ala131Thr, Leu133Thr, Ser137Arg, Ile155Thr, Asn159Asp (or Thr160Ala or both), Ala188Glu, Thr/Ile192Arg/Lys, Arg/Lys193Thr/Ala, Gln226Leu, Gly228Ser
[0619] Δ130, Ser137Arg, Ala188Glu, Thr192Arg/Lys, Arg/Lys193Thr/Met/Ala/Val, Gln226Leu, Gly228Ser
[0620] Δ130, Ser137Arg, Ala188Glu, Thr192Arg/Lys, Arg/Lys193Thr/Met/Ala/Val, Gln226Leu, Gly228Ser, Xaa131Ser/Thr, Xaa132Ser/Thr, Xaa133Ser/Thr, Ser221Pro, Ser227Gly (wherein Xaa=any amino acid)
[0621] Δ130, Xaa131Ser/Thr, Xaa132Ser/Thr, Xaa133Ser/Thr, Ser221Pro, Ser227Gly (wherein Xaa=any amino acid)
[0622] Δ130, Xaa192Xaa′ (wherein Xaa=any hydrophobic amino acid, and Xaa′=any hydrophilic amino acid)
[0623] Δ130, Xaa192Lys/Arg (wherein Xaa=any hydrophobic residue)
[0624] Δ130, Xaa193Xaa′ (wherein Xaa=a basic residue, e.g., Lys or Arg, and Xaa′=a neutral or acidic residue)
[0625] Δ130, Lys/Arg193Thr/Ala/Met/Val
[0626] Δ130, Xaa192Xaa′ (wherein Xaa=any hydrophobic amino acid, and Xaa′=any hydrophilic amino acid), Xaa193Xaa′ (wherein Xaa=a basic residue, e.g., Lys or Arg, and Xaa′=a neutral or acidic residue)
[0627] Δ130, Xaa192Lys/Arg (wherein Xaa=any hydrophobic residue), Xaa193Xaa′ (wherein Xaa=a basic residue, e.g., Lys or Arg, and Xaa′=a neutral or acidic residue)
[0628] Δ130, Xaa192Xaa′ (wherein Xaa=any hydrophobic amino acid, and Xaa′=any hydrophilic amino acid), Lys/Arg193Thr/Ala/Met/Val
[0629] Δ130, Xaa192Lys/Arg (wherein Xaa=any hydrophobic residue), Lys/Arg193Thr/Ala/Met/Val
[0630] Δ130, Ala188Glu
[0631] Δ130, Ala188Asp
[0632] Δ130, Xaa192Xaa′ (wherein Xaa=any hydrophobic amino acid, and Xaa′=any hydrophilic amino acid), Ala188Glu
[0633] Δ130, Xaa192Lys/Arg (wherein Xaa=any hydrophobic residue), Ala188Glu
[0634] Δ130, Xaa193Xaa′ (wherein Xaa=a basic residue, e.g., Lys or Arg, and Xaa′=a neutral or acidic residue), Ala188Glu
[0635] Δ130, Lys/Arg193Thr/Ala/Met/Val, Ala188Glu
[0636] Δ130, Xaa192Xaa′ (wherein Xaa=any hydrophobic amino acid, and Xaa′=any hydrophilic amino acid), Ala188Asp
[0637] Δ130, Xaa192Lys/Arg (wherein Xaa=any hydrophobic residue), Ala188Asp
[0638] Δ130, Xaa193Xaa′ (wherein Xaa=a basic residue, e.g., Lys or Arg, and Xaa′=a neutral or acidic residue), Ala188Asp
[0639] Δ130, Lys/Arg193Thr/Ala/Met/Val, Ala188Asp
[0640] Δ130, Xaa192Xaa′ (wherein Xaa=any hydrophobic amino acid, and Xaa′=any hydrophilic amino acid), Xaa193Xaa′ (wherein Xaa=a basic residue, e.g., Lys or Arg, and Xaa′=a neutral or acidic residue), Ala188Glu
[0641] Δ130, Xaa192Lys/Arg (wherein Xaa=any hydrophobic residue), Xaa193Xaa′ (wherein Xaa=a basic residue, e.g., Lys or Arg, and Xaa′=a neutral or acidic residue), Ala188Glu
[0642] Δ130, Xaa192Xaa′ (wherein Xaa=any hydrophobic amino acid, and Xaa′=any hydrophilic amino acid), Lys/Arg193Thr/Ala/Met/Val, Ala188Glu
[0643] Δ130, Xaa192Lys/Arg (wherein Xaa=any hydrophobic residue), Lys/Arg193Thr/Ala/Met/Val, Ala188Glu
[0644] Δ130, Xaa192Xaa′ (wherein Xaa=any hydrophobic amino acid, and Xaa′=any hydrophilic amino acid), Xaa193Xaa′ (wherein Xaa=a basic residue, e.g., Lys or Arg, and Xaa′=a neutral or acidic residue), Ala188Asp
[0645] Δ130, Xaa192Lys/Arg (wherein Xaa=any hydrophobic residue), Xaa193Xaa′ (wherein Xaa=a basic residue, e.g., Lys or Arg, and Xaa′=a neutral or acidic residue), Ala188Asp
[0646] Δ130, Xaa192Xaa′ (wherein Xaa=any hydrophobic amino acid, and Xaa′=any hydrophilic amino acid), Lys/Arg193Thr/Ala/Met/Val, Ala188Asp
[0647] Δ130, Xaa192Lys/Arg (wherein Xaa=any hydrophobic residue), Lys/Arg193Thr/Ala/Met/Val, Ala188Asp

[0648] In some embodiments, the present invention provides H5 HA polypeptides (e.g., H5 HA polypeptide variants, engineered H5 HA polypeptides, and/or engineered H5 HA polypeptide variants) whose amino acid sequence includes an element as set forth below (the numbering of these positions corresponds to the numbering of H3 HA):
[0649] X190, X193, X225 and X226
[0650] X190, X193, X226 and X228
[0651] X189, X193, X160
[0652] X189, X193, X226, X228
[0653] X187, X189, X193, X226, X228
[0654] X189, X193, X226, X228
[0655] X187, X189, X193, X226, X228
[0656] X156, X189, X193, X226, X228
[0657] X193, X226, X228
[0658] X193, X226, X228
[0659] X189, X193, X225
[0660] X156, X189, X193, X225
[0661] X137, X156, X189, X193, X225
[0662] X190, X193, X225
[0663] X187, X189, X190, X193, X225
[0664] X186, X187, X189, X190, X193, X225
[0665] X186, X187, X189, X190, X193, X225, X227
[0666] X226, X228, X160
[0667] X226, X228, X160
[0668] X228, X160
[0669] X226, X160
[0670] X226, X228
[0671] X160
[0672] X226, X228, Xaa158 (wherein Xaa=any amino acid besides Asn)
[0673] X228, Xaa158 (wherein Xaa=any amino acid besides Asn)
[0674] X226, Xaa158 (wherein Xaa=any amino acid besides Asn)
[0675] X226, X228
[0676] X158 (wherein Xaa=any amino acid besides Asn)
[0677] X130 plus any possible combination of X131, X132, X133, X135, X137, X155, X188, X192, X193, X221, X226, X227, and X228
[0678] X130 plus any possible combination of X131, X132, X135, X188, X192, and X221
[0679] X130 plus any possible combination of X133, X137, X155, X193, X226, X227, and X228
[0680] X130 plus any possible combination of X131, X132, X133, X135, X137, X155, Xaa158 (wherein Xaa=any amino acid besides Asn), X160, X188, X192, X193, X221, X226, X227, and X228
[0681] X130 plus any possible combination of X131, X133, X137, X155, X188, X192, X193, X226, X227, and X228
[0682] X130 plus any possible combination of X131, X133, X137, X155, X188, X192, X193, X226, and X228
[0683] X130 plus any possible combination of X131, X133, X137, X155, X159, X160, X188, X192, X193, X226, X227, and X228
[0684] X130 plus any possible combination of X131, X133, X137, X155, X159, X160, X188, X192, X193, X226, and X228
[0685] X130 plus any possible combination of X137, X188, X192, X193, X226, X228, X131, X132, X133, X221, and X227
[0686] X130 plus any possible combination of X131, X132, X133, X221, and X227
[0687] X130 plus any possible combination of X137, X188, X192, X193, X226, and X228
[0688] X130 plus any possible combination of X137, X188, X192, X193, X226, X227, X228, X131, X132, and X133
[0689] X130 plus any possible combination of X227, X131, X132, and X133
[0690] X226, X228, X160, X130
[0691] X226, X228, X130
[0692] X226, X160, X130
[0693] X228, X160, X130
[0694] X226, X130
[0695] X228, X130
[0696] X160, X130
[0697] X130
[0698] X130, X131, X133, X137, X155, X188, X192, X193, X226, X227, X228
[0699] X130, X131, X133, X137, X155, X188, X192, X193, X226, X228
[0700] X130, X131, X133, X137, X155, X159, X160, X188, X192, X193, X226, X227, X228
[0701] X130, X131, X133, X137, X155, X159, X160, X188, X192, X193, X226, X228
[0702] X130, X137, X188, X192, X193, X226, X228
[0703] X130, X137, X188, X192, X193, X226, X228, X131, X132, X133, X221, X227
[0704] X130, X131, X132, X133, X221, X227
[0705] X130, X192
[0706] X130, X193
[0707] X130, X192, X193
[0708] X130, X188
[0709] X130, X192, X188
[0710] X130, X193, X188
[0711] X130, X192, X193, X188

[0712] wherein X=any amino acid (unless otherwise specified above), and/or X=a missing amino acid. The numbering of these positions corresponds to the numbering of H3 HA.

[0713] In some embodiments X130 is a deletion at a site corresponding to position 130. In some embodiments, X160 is an Ala. In some embodiments, X158 is any amino acid other than Asn.

[0714] In some such embodiments, the H5 HA polypeptide variant has at least one further substitution as compared with a wild type H5 HA, such that affinity and/or specificity of the variant for umbrella glycans is increased.

[0715] In some embodiments, H5 HA polypeptide variants in accordance with the invention (including H5 HA polypeptide variants) have sequences that include L226, S228, and A160. In some embodiments, H5 HA polypeptide variants in accordance with the invention (including H5 HA polypeptide variants) have sequences that include L226 and A160. In some embodiments, H5 HA polypeptide variants in accordance with the invention (including H5 HA polypeptide variants) have sequences that include S228 and A160. In some embodiments, H5 HA polypeptide variants in accordance with the invention (including H5 HA polypeptide variants) have sequences that include A160.

[0716] In some embodiments, H5 HA polypeptide variants in accordance with the invention (including H5 HA polypeptide variants) have sequences that include L226, S228, and X158 (wherein X=any amino acid besides Asn). In some embodiments, H5 HA polypeptide variants in accordance with the invention (including H5 HA polypeptide variants) have sequences that include L226 and X158. In some embodiments, H5 HA polypeptide variants in accordance with the invention (including H5 HA polypeptide variants) have sequences that include S228 and X158. In some embodiments, H5 HA polypeptide variants in accordance with the invention (including H5 HA polypeptide variants) have sequences that include X158.

[0717] In some embodiments, H5 HA polypeptide variants in accordance with the invention (including H5 HA polypeptide variants) have sequences that include Δ130 and any possible combination of mutations at positions corresponding to 131, 132, 133, 135, 137, 155, 158, 160, 188, 192, 193, 221, 226, 227, and 228.

[0718] In some embodiments, H5 HA polypeptide variants in accordance with the invention (including H5 HA polypeptide variants) have sequences that include A130, L226, S228, A160 and any possible combination of mutations at positions corresponding to 131, 132, 133, 135, 137, 155, 158, 188, 192, 193, 221, and 227. In some embodiments, H5 HA polypeptide variants in accordance with the invention (including H5 HA polypeptide variants) have sequences that include Δ130, L226, A160, and any possible combination of mutations at positions corresponding to 131, 132, 133, 135, 137, 155, 158, 188, 192, 193, 221, 227, and 228. In some embodiments, H5 HA polypeptide variants in accordance with the invention (including H5 HA polypeptide variants) have sequences that include Δ130, S228, A160, and any possible combination of mutations at positions corresponding to 131, 132, 133, 135, 137, 155, 158, 188, 192, 193, 221, and 227. In some embodiments, H5 HA polypeptide variants in accordance with the invention (including H5 HA polypeptide variants) have sequences that include Δ130, L226, S228, and any possible combination of mutations at positions corresponding to 131, 132, 133, 135, 137, 155, 158, 160, 188, 192, 193, 221, and 227.

[0719] In some embodiments, H5 HA polypeptide variants in accordance with the invention (including H5 HA polypeptide variants) have sequences that include Δ130, A160, and any possible combination of mutations at positions corresponding to 131, 132, 133, 135, 137, 155, 158, 188, 192, 193, 221, 226, 227, and 228. In some embodiments, H5 HA polypeptide variants in accordance with the invention (including H5 HA polypeptide variants) have sequences that include Δ130, L226, and any possible combination of mutations at positions corresponding to 131, 132, 133, 135, 137, 155, 158, 160, 188, 192, 193, 221, and 227, and 228. In some embodiments, H5 HA polypeptide variants in accordance with the invention (including H5 HA polypeptide variants) have sequences that include Δ130, S228, and any possible combination of mutations at positions corresponding to 131, 132, 133, 135, 137, 155, 158, 160, 188, 192, 193, 221, 226, and 227.

[0720] In some embodiments, H5 HA polypeptides in accordance with the invention (including H5 HA polypeptide variants) have sequences that include Δ130, L226, S228, X158 (wherein X=any amino acid besides Asn) and any possible combination of mutations at positions corresponding to 131, 132, 133, 135, 137, 155, 160, 188, 192, 193, 221, and 227. In some embodiments, H5 HA polypeptides in accordance with the invention (including H5 HA polypeptide variants) have sequences that include Δ130, L226, X158, and any possible combination of mutations at positions corresponding to 131, 132, 133, 135, 137, 155, 160, 188, 192, 193, 221, 227, and 228. In some embodiments, H5 HA polypeptides in accordance with the invention (including H5 HA polypeptide variants) have sequences that include Δ130, S228, X158, and any possible combination of mutations at positions corresponding to 131, 132, 133, 135, 137, 155, 160, 188, 192, 193, 221, and 227. In some embodiments, H5 HA polypeptides in accordance with the invention (including H5 HA polypeptide variants) have sequences that include Δ130, L226, S228, and any possible combination of mutations at positions corresponding to 131, 132, 133, 135, 137, 155, 158, 160, 188, 192, 193, 221, and 227.

[0721] In some embodiments, H5 HA polypeptides in accordance with the invention (including H5 HA polypeptide variants) have sequences that include Δ130, X158 (wherein X=any amino acid besides Asn), and any possible combination of mutations at positions corresponding to 131, 132, 133, 135, 137, 155, 160, 188, 192, 193, 221, 226, 227, and 228.

[0722] In some embodiments, H5 HA polypeptide variants in accordance with the invention have an open binding site as compared with a parent H5 HA, and particularly with a parent wild type H5 HAs.

[0723] In some embodiments, H5 HA polypeptides in accordance with the invention bind to the following α2-6 sialylated glycans:

[chemical structure]

and combinations thereof. In some embodiments, H5 HA polypeptides in accordance with the invention bind to glycans of the structure:

[chemical structure]

and combinations thereof; and/or

[chemical structure]

and/or

[chemical structure]

and/or

[chemical structure]

and combinations thereof. In some embodiments, H5 HA polypeptides in accordance with the invention bind to

[chemical structure]

and/or

[chemical structure]

in some embodiments to

[chemical structure]

in some embodiments to

[chemical structure]

and in some embodiments to

[chemical structure]

and/or

[chemical structure]

[0724] In some embodiments, H5 HA polypeptides in accordance with the invention bind to umbrella topology glycans. In some embodiments, H5 HA polypeptides in accordance with the invention bind to at least some of the glycans (e.g., α2-6 sialylated glycans) depicted in FIG. 9. In some embodiments, H5 HA polypeptides in accordance with the invention bind to multiple glycans depicted in FIG. 9.

[0725] In some embodiments, H5 HA polypeptides in accordance with the invention bind to at least about 10%, about 15%, about 20%, about 25%, about 30% about 35%, about 40%, about 45%, about 50%, about 55%, about 60%, about 65%, about 70%, about 75%, about 80%, about 85%, about 90% about 95%, or more of the glycans found on HA receptors in human upper respiratory tract tissues (e.g., epithelial cells).

[0726] In some embodiments, H5 HA polypeptides (including H5 HA polypeptide variants) are any of those set forth in SEQ ID NOs: 50, 51, 53-55, -60-75 and 205-206.

[0727] In one aspect, the present invention provides the particular recognition that high affinity binding to umbrella-topology glycans alone may not be sufficient to confer effective transmission to/infectivity of humans. The present invention provides the insight that reduced binding to cone-topology glycans may also be important. In some embodiments, high affinity binding to umbrella-topology glycans and reduced affinity binding to cone-topology glycans may be involved in conferring effective transmission to/infectivity of humans. In some embodiments, high affinity binding to umbrella-topology glycans is sufficient to confer effective transmission to/infectivity of humans. In some embodiments, high affinity binding to umbrella-topology glycans is sufficient to confer effective transmission to/infectivity of humans, even if the affinity of binding to cone-topology glycans is not reduced (e.g., unchanged, increased, etc.).

[0728] In some embodiments, increased affinity and/or specificity of binding of an H5 HA polypeptide variant to umbrella-topology glycans and reduced affinity and/or specificity binding to cone-topology glycans may be involved in increasing or enhancing transmission to/infectivity of humans relative to a reference polypeptide (e.g., the H5 HA polypeptide variant's cognate parent HA polypeptide). In some embodiments, increased affinity and/or specificity of binding of an H5 HA polypeptide variant to umbrella-topology glycans is sufficient to increase or enhance transmission to/infectivity of humans relative to a reference polypeptide (e.g., the H5 HA polypeptide variant's cognate parent HA polypeptide). In some embodiments, increased affinity and/or specificity of binding of an H5 HA polypeptide variant to umbrella-topology glycans is sufficient to increase or enhance transmission to/infectivity of humans relative to a reference polypeptide (e.g., the H5 HA polypeptide variant's cognate parent HA polypeptide), even if the affinity and/or specificity of binding to cone-topology glycans is not reduced (e.g., unchanged, increased, etc.). In some embodiments, increased affinity and/or specificity of binding of an H5 HA polypeptide variant to umbrella-topology glycans is sufficient to increase or enhance transmission to/infectivity of humans relative to a reference polypeptide (e.g., the H5 HA polypeptide variant's cognate parent HA polypeptide), even if the affinity and/or specificity of binding to cone-topology glycans is equal to and/or greater than that of the affinity and/or specificity of binding to umbrella-topology glycans.

### Example 3

### Glycan Diversity in Human Upper Respiratory Tissues

[0729] Lectin binding studies showed diversity in the distribution of α2-3 and α2-6 in the upper respiratory tissues. Staining studies indicate predominant distribution of α2-6 sialylated glycans as a part of both N-linked (ciliated cells) and O-linked glycans (in the goblet cells) on the apical side of the tracheal epithelium (FIG. 12). On the other hand, the internal regions of the tracheal tissue predominantly comprises of α2-3 distributed on N-linked glycans.

[0730] MALDI-MS glycan profiling analyses showed a substantial diversity (FIG. 10) as well as predominant expression of α2-6 sialylated glycans on the human upper airways. Fragmentation of representative mass peaks using MALDI TOF-TOF supports glycan topologies where longer oligosaccharide branches with multiple lactosamine repeats are extensively distributed as compared to short oligosaccharide branches (FIG. 10). To provide a reference for the diversity in the distribution and topology of glycans in the upper airway, MALDI-MS analysis was performed on N-linked glycans from human colonic epithelial cells (HT29). Recent H5N1 viruses have primarily infected the gut, and hence, these cells were chosen as representative gut cells. The glycan profile of HT29 cells is significantly different from that of the HBEs wherein there is a predominant distribution of α2-3 and the long oligosaccharide branch glycan topology is not as observed (FIG. 10).

[0731] Data in FIG. 12 were generated by the following method. Formalin fixed and paraffin embedded human tracheal tissue sections were purchased from US Biological. After the tissue sections were deparaffinized and rehydrated, endogenous biotin was blocked using the streptavidin/biotin blocking kit (Vector Labs). Sections were then incubated with FITC labeled Jacalin (specific for O-linked glycans), biotinylated Concanavalin A (Con A, specific for α-linked mannose residues, which are part of the core oligosaccharide structure that constitute N-linked glycans), biotinylated Maackia amurensis lectin (MAL, specific for SAα2,3-gal) and biotinylated Sambuccus nigra agglutinin (SNA, specific for SAα2,6-gal) (Vector labs; 10 μg/ml in PBS with 0.5% Tween-20) for 3 hrs. After washing with TBST (Tris buffered saline with 1% Tween-20), the sections were incubated with Alexa fluor 546 streptavidin (2 μg/ml in PBS with 0.5% Tween-20) for 1 hr. Slides were washed with TBST and viewed under a confocal microscope (Zeiss LSM510 laser scanning confocal microscopy). All incubations were performed at room temperature (RT).

[0732] Data in FIG. 10 were generated using the following method. The cells (˜70×10⁶) were harvested when they were >90% confluent with 100 mM citrate saline buffer and the cell membrane was isolated after treatment with protease inhibitor (Calbiochem) and homogenization. The cell membrane fraction was treated with PNGaseF (New England Biolabs) and the reaction mixture was incubated overnight at 37° C. The reaction mixture was boiled for 10 min to deactivate the enzyme and the deglycosylated peptides and proteins were removed using a Sep-Pak C18 SPE cartridge (Waters). Glycans were further desalted and purified into neutral (25% acetonitrile fraction) and acidic (50% acetonitrile containing 0.05% trifluoroacetic acid) fractions using graphitized carbon solid-phase extraction columns (Supelco). Acidic fractions were analyzed by MALDI-TOF MS in positive and negative modes respectively with soft ionization conditions (accelerating voltage 22 kV, grid voltage 93%, guide wire 0.3% and extraction delay time of 150 ns). The peaks were calibrated as non-sodiated species. The predominant expression of α2-6 sialylated glycans was confirmed by pretreatment of samples using Sialidase A and S. Isolated glycans were subsequently incubated with 0.1 U of Arthrobacter ureafaciens sialidase (Sialidase A, non-specific) or Streptococcus pneumoniae sialidase (Sialidase S, specific for α2-3 sialylated glycans) in a final volume of 100 mL of 50 mM sodium phosphate, pH 6.0 at 37° C. for 24 hrs. Neutral and the acidic fractions were analyzed by MALDI-TOF MS in positive and negative modes respectively.

### Example 4

### Binding of H5 HA Polypeptide Variants to Human Lung Tissues

[0733] Binding of Formalin fixed and paraffin embedded human tissue lung and tracheal sections are provided (e.g., purchased from US Biomax, Inc. and from US Biological, respectively). Tissue sections are deparaffinized, rehydrated and incubated with 1% BSA in PBS for 30 minutes to prevent non-specific binding. H5 HAs are pre-complexed with primary antibody (mouse anti 6×His tag) and secondary antibody (Alexa-fluor 488 goat anti mouse) in a ratio of 4:2:1, respectively, for 20 minutes on ice. The complexes formed are diluted in 1% BSA-PBS to a final HA concentration of 40, 20 or 10 μg/ml. Tissue sections are then incubated with the HA-antibody complexes for 3 hours at RT. Sections are counterstained with propidium iodide (Invitrogen; 1:100 in TBST), washed extensively and then viewed under a confocal microscope (Zeiss LSM510 laser scanning confocal microscopy).

[0734] Precomplexed H5 HAs are also used along with other lectins such as Jacalin (marker for non-ciliated mucinous cells such as goblet cells) to co-stain tissue sections to obtain additional information on whether HA stains ciliated and/or non-ciliated cells in the tissue epithelia.

### Example 5

### Testing H5 HA Polypeptide in an Animal Host

[0735] As described herein, the present invention encompasses the recognition that the use of animal hosts (e.g., ferrets) for the study of transmission of virus may provide a reliable indicator of human virus transmission. Similarly, the present invention encompasses the recognition that the use of animal hosts (e.g., ferrets) treated with binding agents in accordance with the invention (e.g., HA polypeptides) for the study of transmission of virus may provide a reliable indicator of the efficacy of such binding agents in accordance with the invention for prevention or treatment of virus in a human host.

### Virus Transmission Assay

[0736] A virus transmission assay is used in the presence or absence of binding agents in accordance with the invention to determine viral transmission in a suitable animal model. For example, animal hosts, e.g., ferrets, are housed in adjacent cages that prevent direct and indirect contact between animals. However, these housing conditions allow the spread of influenza virus through the air. A first portion of the animals are innoculated via methods known in the art (e.g., intranasally, intramuscularly, or any of the modes of administration described herein) with an effective amount of virus (“innoculated animals”). Naïve animals can then be introduced into cages adjacent to the innoculated animals one, two, three or more days later.

[0737] Animals used in the study can be killed at any time one, two, three or more days post-inoculation or transmission for analysis. Suitable analysis for virus transmission studies can include, but is not limited to determination of infectious virus titers (e.g., by nasal washes), observation of physical symptoms in the animals (e.g., lethargy, anorexia, rhinorrhea, sneezing, high fever, and/or death), immunohistochemical analysis of respiratory tissues, among others.

[0738] The virus transmission assay described above can also incorporate the treatment of the animal host with a binding agent in accordance with the invention described herein before, during or after inoculation or transmission of virus. Analytic methods described herein are then used to determine the efficacy of the binding agent(s) in blocking transmission and/or infection of the animal host with the virus.

### Serological Studies

[0739] Binding agents and/or vaccine compositions comprising binding agents are administered intramuscularly in ferrets on day 0, followed by a booster dose on day 21. Blood from each animal is recovered on days 0, 14, 21, and 35. The collected serum is examined in vitro for its ability to inhibit virus agglutination and neutralize virus infection.

[0740] Hemagglutination Inhibition (HAI) Assay

[0741] HAI titrations are performed in 96-well v-bottom plates (Corning). Sera are serially diluted 2-fold and added to 4 agglutinating doses of influenza A virus in a total volume of 200 μl. Next, 25 μl of a 2% (vol/vol) erythrocyte solution is added. Sera, virus, and erythrocytes are gently mixed and the assay is read out after incubating for 30 min. Titers are recorded as the inverse of the highest antibody dilution that inhibited 4 agglutinating doses of virus.

[0742] In Vitro Neutralization Assay

[0743] Serial dilutions of sera is mixed with viruses and incubated at room temperature for 30 min, and then incubated with MDCK cells for 1 hr at 37° C. Cells are then washed twice with serum-free media, and then fresh media with or without trypsin is added. Virus growth is scored by cytopathic effect. Data are expressed as the inverse dilution of highest dilution of sera that causes neutralization.

### Virus Challenge Assay

[0744] Vaccinated ferrets are challenged intranasally with homologous and heterologous wild-type and mutant H5N1 strains. Nasal washes are taken from ferrets on days 1, 3, and 5 post-challenge. Virus is titrated in MDCK cells to determine virus shedding in the respiratory tract.

### Example 5

### A Two-Amino Acid Change in Recent Isolates of H5N1 Hemagglutinin is Sufficient to Switch its Preference to Human Receptors

[0745] Introduction

[0746] Highly pathogenic H5N1 is a global concern that has initiated several localized outbreaks in humans since 2003 (Heumann et al., 2010, Cell Res, 20:51; Guan et. al., 2009, Rev Sci Tech, 28:39; both of which are hereby incorporated by reference). Existing H5N1 strains are incapable of aerosol transmission but rather are primarily transmitted through direct contact with infected animals. However, the high morbidity and mortality rate associated with infection (˜60%) as well as the known ability of influenza subtypes (including H5N1) to acquire phenotypic traits through either mutation or gene reassortment, suggests that a H5N1 strain could acquire aerosol transmissibility (Yen et. al., 2009, Curr Top Microbiol Immunol, 333:3; incorporated herein by reference). Coupled with the potential for such a virus to cause severe infection, the fact that the human population has no pre-existing immunity to H5N1, suggests that a future epidemic or pandemic may occur should such a strain arise (Subbarao et. al., 2007, PLoS pathogens, 3:e40; incorporated herein by reference).

[0747] The use of reverse genetics systems has indicated that of the 11 gene products, acquisition of certain amino acid changes in hemagglutinin (HA) and the polymerase (PB2) are vital for human aerosol transmission (Hoeven et. al., 2009, Pro Natl Acad Sci USA, 106:3366; incorporated herein by reference). Addressing the functional effect of genetic alterations in these proteins is thus especially important to identify the potential for phenotypic alterations. In the case of PB2, a critical alteration of lysine to glutamate at position 627 is key for acquiring aerosol transmissibility (Hoeven et. al., 2009, Pro Natl Acad Sci USA, 106:3366; incorporated herein by reference). However, given the biological role of HA, viz., binding to glycan receptors leading to fusion of the virion and infection, specific mutations that lead to human adaptation are thought to be subtype- and strain-specific (Stevens et. al., 2006, Nat Rev Microbiol, 4:857; Russell et. al., 2006, Glycoconj J, 23:85; both of which are hereby incorporated by reference).

[0748] Previous studies have identified that the receptor for HA are glycans terminated by particular glycan structures (e.g., “umbrella topology” or “cone topology” α2→3 or α2→6-linked sialic acid). Avian-adapted H5N1 HAs preferentially bind to glycan receptors terminated by cone topology glycans, many of which have α2→3 linked sialic acid (avian receptors) (Stevens etl al., 2006, J Mol Biol, 355:1143; Gambaryan et. al., 2006, Virology, 344:432; both of which are hereby incorporated by reference). HAs of human-adapted H1N1, H2N2, and H3N2 strains have a demonstrated switch in binding preference from cone topology (e.g., many α2→3) to umbrella topology (e.g., many α2→6 sialylated glycans) (human receptors) and a characteristic high affinity binding to human receptors, which have been shown to correlate with the airborne transmissibility of these human-adapted viruses (Pappas et. al., 2010, PLoS One, 5:e11158; Tumpey et. al., 2007, Science, 315:655; both of which are hereby incorporated by reference). Utilizing this framework, recent studies have identified sets of mutations which would lead to human adaptation of the currently circulating strains of H2N2, H7N7 and H9N2 (Viswanathan et. al., 2010, PLoS One, 5:e13768; Belser et. al., 2008, Proc Natl Acad Sci USA, 105:7558; Sorrell et. al., 2009, Proc Natl Acad Sci USA, 106:7565; all of which are hereby incorporated by reference). These studies demonstrate that mutations required for conversion may differ based on the subtype, and even the particular strain, studied. Previous studies (Maines et. al., 2011, Virology, 413:139; Stevens et. al., 2008, J Mol Biol, 381:1382; Stevens et. al., 2006, Science, 312:404; all of which are hereby incorporated by reference) that have mutated H5N1 strains to include either the hallmark changes for H2/H3 (Q226L and G228S or LS) and/or H1 (E190D, G225D or DD) mutations have shown that none of these mutants quantitatively ‘switch’ to human receptor specificity and affinity which is characteristic of human-adapted ‘pandemic’ strain HAs (FIG. 20). Attempts to introduce the hallmark LS residues on the A/Vietnam/1203/04 (Viet03_{—}04) sequence have not yielded the switch. The present inventors have established key structural features that are needed to suitably accommodate the hallmark LS residues. The present inventors have also determined which structural features are required to facilitate a switch in receptor specificity as enable binding with high affinity to human receptors.

[0749] Experimental Design

[0750] Influenza HA is a homotrimeric protein, wherein a monomer contains 552 amino acids. Each monomer is composed of two disulphide-linked moieties, HA1 and HA2. HA1 comprises the glycan-receptor binding site (RBS), whereas HA2 is involved in the fusion of the viral and cellular membranes. The RBS pocket involves HA positions 95, 131, 133, 136, 137, 138, 145, 153, 155, 156, 158, 159, 183, 186, 187, 189, 190, 192, 193, 194, 195, 196, 219, 222, 224, 225, 226, 227, 228 (H3 numbering used).

[0751] In order to determine structural features and correct H5 HA sequences that will accommodate the LS residues, the current inventors performed a detailed structural comparison of the RBS H2 and H5 HA, since H5 HA is closest to H2 HA phylogenitically (FIG. 21). For this study, the prototypic pandemic H2 (A/Albany/6/58 or Alb6_{—}58) HA with the representative H5N1 HA from an earlier human isolate (A/Vietnam/1203/04 or Viet03_{—}04) was chosen. Having made a comparative analysis, the current study identified four distinct features which distinguish the RBS of H5 HA from that of H2 HA (FIG. 22). First, the composition of the 130 loop of H2 HA is different from H5 HA, which includes a deletion at position 130 (H3 numbering) in H5 HA. Second, there are differences in amino acid composition at the ‘top’ of the RBS or the ‘190-helix’ (such as in positions 188, 192 and 193) that interact with sugar residues beyond the terminal Neu5Acα2-6Gal-motif of the human receptor. Third, there are differences in amino acid compositions at the ‘base’ of the RBS (such as in positions 137, 221, 226 and 228 which include LS changes) that interact with the Neu5Acα2-6Gal-motif of the human receptor. Fourth, the glycosylation site at position 158 in H5 HA is absent in H2 HA. Glycosylation at this site could potentially interfere with sugar residues beyond the terminal Neu5Acα2-6Gal-motif of the human receptor bound to the RBS (Stevens et. al., 2008, J Mol Biol, 381:1382; Wang et. al., 2010, Journal of Virology, 84:6570; both of which are hereby incorporated by reference). The inventive findings encompass this detailed comparison of RBS of H2 and H5 HA, which suggests particular amino acid differences that go beyond the more characteristic LS changes previously observed. The present inventors sought to identify appropriate H5 HA sequences that would facilitate matching the structural features of H2 HA RBS in the context of the LS mutations.

[0752] Analysis of all the H5N1 sequences to-date (both avian and human isolates) allowed the inventors to make three further observations: 1) H5 HAs from many of the recent avian and human isolates (after 2007) have already acquired the deletion in the 130-loop matching the first feature, 2) key amino acid changes were already observed in the ‘190-helix’ matching feature 2, and 3) loss of glycosylation at 158 position (feature 4) is also observed in many H5 HA sequences. In the context of the key structural features of HA RBS, the inventors determined that the deletion in the 130 loop along with a loss of glycosylation (features 1 and 4) concurrently in the same HA was critical in the evolution of H5 HA. The present invention, however, encompasses the recognition that the loss of glycosylation is concomitant with the deletion of 130-loop residue and not vice versa. The present invention encompasses the observation that specific current H5 HA strains have diverged considerably from older human isolates (such as Viet03_{—}04), but have also acquired key structural features necessary for matching the pandemic H2 HA RBS.

[0753] Thus the present inventors assessed whether strains that have features 1 and 4 would be the correct H5 HA sequence to suitably accommodate the hallmark LS residues. For the experiment strain A/chicken/Egypt/R2/2007 (or ckEgy_{—}07) was chosen as a representative H5 HA which naturally acquired features 1 and 4 (FIG. 23). Introduction of just the LS mutation (ckEgy_{—}07_LS) on this H5 HA sequence showed a switch and high affinity binding to human receptors (and relatively poor affinity to avian receptors), thereby resembling the glycan binding characteristics of human-adapted ‘pandemic’ HAs (FIG. 24 A,B and FIG. 25). Additional findings demonstrate binding of this mutant H5 HA to human receptors on the apical surface of the human tracheal epithelia (FIG. 24C) that resembles the staining of this tissue by pandemic HAs (Viswanathan et. al., 2010, PLoS One, 5:e13768; Maines et. al., 2009, Science, 325:484; both of which are hereby incorporated by reference).

[0754] Earlier efforts by others to introduce the LS changes alone on older human isolates such as Viet03_{—}04 did not lead to a switch and underscored the need to understand structural features of H5 HA RBS that can accommodate the LS mutations. Given that the (ckEgy_{—}07_LS) also naturally acquired feature 4, the inventors assessed whether this feature alone i.e. loss of glycosylation (achieved through T160A mutation) together with LS switches the glycan receptor-binding preference of Viet03_{—}04 (FIG. 25). Compared to Viet03_{—}04 wild-type HA, the dose-dependent direct glycan binding of this mutant strain showed human receptor-binding but also retained its high affinity avian receptor binding which is uncharacteristic of pandemic human-adapted HAs (FIG. 25). Introduction of the LS change alone on another strain (A/Egypt/2786-NAMRU3/06 or Egy_{—}06), which naturally acquired feature 4, corroborates this observation. Finally, consistent with this structural framework, mutations on a representative H5 HA (A/chicken/Vietnam/NCVD-093/08 or ckViet_{—}08), which naturally acquired feature 2 (FIG. 22C) conferred human receptor binding affinity but also retained high affinity avian receptor binding (FIG. 26).

### Discussion

[0755] The present inventors, for the first time, have defined certain structural features that are needed to suitably accommodate the hallmark LS residues. In addition, the inventors results provide the insight that certain current circulating H5 HAs only require two amino acid changes, the hallmark LS, to switch H5 HA preference to human receptors thereby leading to their human adaptation. Using the information from the invention, the inventors rationally selected appropriate H5 HA sequences (albeit from a small representative pool of total H5N1 HAs) that was amenable to switching receptor specificity by incorporating just the LS changes. One characteristic property of these current H5 HAs is that they have naturally evolved to acquire features 1, 2 and 4 (FIG. 27). Although, only 6% of the 2277 non-redundant H5N1 HA sequences in the NCBI database have acquired features 1 & 4, however, it represents about 45% of H5N1 strains isolated in 2009 and 2010. Further phylogenetic analyses of the H5N1 HAs reveal that the naturally acquired features 1 & 4 belong to clade 2.2.1. Thus far, occurrence of feature 1 appears to be exclusive to clade 2.2.1, however the existence of feature 4 is not restricted to 2.2.1. Critically, the clade 2.2.1 strains have already diverged considerably from older human isolates (such as Viet03_{—}04) and are closer to human adaptation than these previous strains. All of the reported human H5N1 isolates belonging to clade 2.2.1 are from Egypt and Israel. Therefore, it is important to monitor the evolution of the clade 2.2.1 strains.

[0756] Exemplary H5N1 Strains with a Postitively Charged Residue at Postion 129 (Feature 2)

[0757] ABJ96761/204-204 Avian China 2005 from clade 2.3.4; ABJ96763/204-204 Avian China 2005 from clade 2.3.4; ABJ96764/204-204 Avian China 2006 from clade 2.3.4; ACN39415/204-204 Avian China 2007 from clade 2.3.4; ACO07037/204-204 Avian Viet Nam 2008 from clade 7; ADG28677/204-204 Avian Egypt 2009 from clade 2.2.1; ADI58758/204-204 Avian Israel 2010 from clade 2.2.1; ADM85869/204-204 Avian Egypt 2010 from clade 2.2.1; and ADG28684/204-204 Avian Egypt 2010 from clade 2.2.1.

Exemplary H5N1 Strains with a Deletion at 130 (and Loss of Glycosylation at 158) on the Same HA all Belonging to Clade 2.2.1 (Feature 1). Include but are not Limited to:

ABP96845 Human Egypt 2007
(SEQ ID NO. 122)
MEKIVLLLAIVSLVKSDQICIGYHANNSTEQVDTIMEKNVTVTHAQDILEKTHNGKLCNLDGVKPLILR
DCSVAGWLLGNPMCDEFLNVPEWSYIVEKINPANDLCYPGNFNDYEELKHLLSRINHFEKIQIIPKNSWSDH
EASGVSSACPYQGRSSFFRNVVWLTKRDNAYPTIKRSYNNTNQEDLLVLWGIHHPNDAAEQXRLYQNPTTY
ISVGTSTLNQRLVPKIATRSKVNGQXGRMEFFWTILKSNDAINFESNGNFIAPENAYKIVKKGDSTIMKSEL
EYGNCNTKCQTPIGAINSSMPFHNIHPLTIGECPKYVKSNRLVLATGLRNSPQGERRRKKRGLFGAIAG
FIEGGWQGMVDGWYGYHHSNEQGSGYAADKESTQKAIDGVTNKVNSIIDKMNTQFEAVGREFNNLERRIENL
NKKMEDGFLDVWTYNAELLVLMENERTLDFHDSNVKNLYDKVRLQLRDNAKELGNGCFEFYHRCDNECMESV
RNGTYDYPQYSEEARLKREEISGVKLESIGTYQILSIYSTVASSLALAIMVAGLSLWMCSNGSLQCRICI
>ABP96854 Human Egypt 2007
(SEQ ID NO. 123)
MEKIVLLLAIVSLVKSDQICIGYHANNSTEQVDTIMEKNVTVTHAQDILEKTHNGKLCNLDGVKPLILR
DCSVAGWLLGNPMCDEFLNVPEWSYIVEKINPANDLCYPGNFNDYEELKHLLSRINHFEKIQIIPKNSWSDH
EASGVSSACPYQGRSSFFRNVVWLTKKDNAYPTIKRSYNNTNQEDLLVLWGIHHPNDAAEQTRLYQNPTTY
ISVGTSTLNQRLVPKIATRSKVNGQSGRMEFFWTILKSNDAINFESNGNFIAPENAYKIVKKGDSTIMKSEL
EYGNCNTKCQTPIGAINSSMPFHNIHPLTIGECPKYVKSNRLVLATGLRNSPQGERRRKKRGLFGAIAG
FIEGGWQGMVDGWYGYHHSNEQGSGYAADKESTQKAIDGVTNKVNSIIDKMNTQFEAVGREFNNLERRIENL
NKKMEDGFLDVWTYNAELLVLMENERTLDFHDSNVKNLYDKVRLQLRDNAKELGNGCFEFYHRCDNECMESV
RNGTYDYPQYSEEARLKREEISGVKLESIGTYQILSIYSTVASSLALAIMVAGLFLWMCSNGSLQCRICI
>ABM92273 Egypt 2007
(SEQ ID NO. 124)
MEKIVLLLAIVSLVKSDQICIGYHANNSTEQVDTIMEKNVTVTHAQDILEKTHNGKLCNLNGVKPLILR
DCSVAGWLLGNPMCDEFLNVPEWSYIVEKINPANDLCYPGNFNDYEELKHLLSRINHFEKIQIIPKNSWSDH
EASGVSSACPYQGRSSFFRNVVWLTKKDNAYPTIKRSYNNTNQEDLLVLWGIHHPNDAAEQTRLYQNPTTY
ISVGTSTLNQRLVPKIAARSKVNGQSGRMEFFWTILKSNDAINFESNGNFIAPENAYKIVKKGDSTIMKSEL
EYGNCNTKCQTPIGAINSSMPFHNIHPLTIGECPKYVKSNRLVLATGLRNSPQGERRRKKRGLFGAIAG
FIEGGWQGMVDGWYGYHHSNEQGSGYAADKESTQKAIDGVTNKVNSIIDKMNTQFEAVGREFNNLERRIENL
NKKMEDGFLDVWTYNAELLVLMENERTLDFHDSNVKNLYDKVRLQLRDNAKELGNGCFEFYHRCDNECMESV
RNGTYDYPQYSEEARLKREEISGVKLESIGTYQILSIYSTVASSLALAIMVAGLFLWMCSNGSLQCRICI
>ACT15310 Human Egypt 2009
(SEQ ID NO. 125)
MEKIVLLLAIVSLVKSDQICIGYHANNSTEQVDTIMEKNVTVTHAQDILEKTHNGKLCNLDGVKPLILR
DCSVAGWLLGNPMCDEFLNVPEWSYIVEKINPANDLCYPGNFNDYEELKHLLSRINHFEKIQIIPKNSWSDH
EASGVSSACPYQGRPSFFRNVVWLTKKDNAYPTIKRSYNNTNQEDLLVLWGIHHPXDAAEQTRLYQNPTTY
ISVGTSTLNQRLVPKIATRSKVNGQSGRMEFFWTILKSNDAINFESNGNFIAPENAYKIVKKGDSTIMKSEL
EYGNCNTKCQTPIGAINSSMPFHNIHPLTIGECPKYVKSNRLVLATGLRNSPQGERRRKKRGLFGAIAG
FIEGGWQGMVDGWYGYHHSNEQGSGYAADKESTQKAIDGVTNKVNSIIDKMNTQFEAVGREFNNLERRIGNL
NKKMEDGFLDVWTYNAELLVLMENERTLDFHDSNVKNLYDKVRLQLRDNAKELGNGCFEFYHRCDNECMESV
RNGTYDYPQYSEEARLKREEISGVKMESIGTYQILSIYSTVASSLALAIMVAGLFLWMCSNGSLQCRICI
>ACT15312 Human Egypt 2009
(SEQ ID NO. 126)
MEKIVLLLAIVSIVKSDQICIGYHANNSTEQVDTIMEKNVTVTHAQDILEKTHNGKLCNLDGVKPLILR
DCSVAGWLLGNPMCDEFLNVPEWSYIVEKINPANDLCYPGNFNDYEELKHLLSRINHFEKIQIIPKNSWSDH
EASGVSSACPYQGRSSFFRNVVWLTKKNNAYPTIKRSYNNTNQEDLLVLWGIHHPNDAAEQTRLYQNPTTY
ISVGTSTLNQRLVPKIATRSKVNGQSGRMEFFWTILKSNDAINFESNGNFIAPENAYKIVKKGDSTIMKSEL
EYGNCNTKCQTPIGAINSSMPFHNIHPLTIGECPKYVKSNRLVLATGLRNSPQGERRRKKRGLFGAIAG
FIEGGWQGMVDGWYGYHHSNEQGSGYAADKESTQKAIDGVTNKVNSIIDKMNTQFEAVGREFNNLERRIENL
NKKMEDGFLDVWTYNAELLVLMENERTLDFHDSNVKNLYDKVRLQLRDNAKELGNGCFEFYHRCDNECMESV
RNGTYDYPQYSEEARLKREEISGVKLESIGTYQILSIYSTVASSLALAIMVAGLFLWMCSNGSLQCRICI
>ACT15314 Human Egypt 2009
(SEQ ID NO. 127)
MEKIVLLLAIVSLVKSDQICIGYHANNSTEQVDTIMEKNVTVTHAQDILEKTHNGKLCNLDGVKPLILR
DCSVAGWLLGNPMCDEFLNVPEWSYIVEKINPANDLCYPGNFNDYEELKHLLSRINHFEKIQIIPKNSWSDH
EASGVSSACPYQGRSSFFRNVVWLTKKNNAYPTIKRSYNNTNQEDLLVLWGIHHPNDAAEQTRLYQNPTTY
ISVGTSTLNQRLVPKITTRSKVNGQSGRMEFFWTILKSNDAINFESNGNFIAPENAYKIVKKGDSTIMKSEL
EYGNCNTKCQTPIGAINSSMPFHNIHPLTIGECPKYVKSNRLVLATGLRNSPQGERRRKKRGLFGAIAG
FIEGGWQGMVDGWYGYHHSNEQGSGYAADKESTQKAIDGVTNKVNSIIDKMNTQFEAVGREFNNLERRIENL
NKKMEDGFLDVWTYNAELLVLMENERTLDFHDSNVKNLYDKVRLQLRDNAKELGNGCFEFYHRCDNECMESV
RNGTYDYPQYSEEARLKREEISGVKLESIGTYQILSIYSTVASSLALAIMVAGLFLWMCSNGSLQCRICI
>ACT15316 Human Egypt 2009
(SEQ ID NO. 128)
MEKIVLLLAIVSLVKSDQICIGYHANNSTEQVDTIMEKNVTVTHAQDILEKTHNGKLCNLDGVKPLILR
DCSVAGWLLGNPMCDEFLNVPEWSYIVEKINPANDLCYPGNFNDYEELKHLLSRINHFEKIQIIPKNSWSDH
EASGVSSACPYQGRSSFFRNVVWLTKKDNAYPTIKRSYNNTNQEDLLVLWGIHHPNDAAEQTRLYQNPTTY
ISVGTSTLNQRLIPKIATRSKVNGQSGRMEFFWTILKSNDAINFESNGNFIAPENAYKIVKKGDSTIMKSEL
EYGNCNTKCQTPIGAINSSMPFHNIHPLTIGECPKYVKSNRLVLATGLRNSPQGERRRKKRGLFGAIAG
FIEGGWQGMVDGWYGYHHSNEQGSGYAADKESTQKAIDGVTNKVNSIIDKMNTQFEAVGREFNNLERRIENL
NKKMEDGFLDVWTYNAELLVLMENERTLDFHDSNVKNLYDKVRLQLRDNAKELGNGCFEFYHRCDNECMESV
RNGTYDYPQYSEEARLKREEISGVKLESIGTYQILSIYSTVASSLALAIMVAGLFLWMCSNGSLQCRICI
>ACT15318 Human Egypt 2009
(SEQ ID NO. 129)
MEKIVLLLAIVSLVKSDQICIGYHANNSTEQVDTIMEKNVTVTHAQDILEKTHNGKLCNLDGVKPLILR
DCSVAGWLLGNPMCDEFLNVPEWSYIVEKINPANDLCYPGNFNDYEELKHLLSRINHFEKIQIIPKNSWSDH
EASGVSSACPYQGRSSFFRNVVWLTKKDNAYPTIKRSYNNTNQEDLLVLWGIHHPNDAAEQTRLYQNPTTY
ISVGTSTLNQRLVPKIATRSKVNGQSGRMEFFWTILKSNDAINFESNGNFIAPENAYKIVKKGDSTIMKSEL
EYGNCNTKCQTPIGAINSSMPFHNIHPLTIGECPKYVKSNRLVLATGLRNSPQGERRRKKRGLFGAIAG
FIEGGWQGMVDGWYGYHHSNEQGSGYAADKESTQKAIDGVTNKVNSIIDKMNTQFEAVGREFNNLERRIENL
NKKMEDGFLDVWTYNAELLVLMENERTLDFHDSNVKNLYDKVRLQLRDNAKELGNGCFEFYHRCDNECMESV
RNGTYDYPQYSEEARLKREEISGVKLESIGTYQILSIYSTVASSLALAIMVAGLFLWMCSNGSLQCRICI
>ACT15320 Human Egypt 2009
(SEQ ID NO. 130)
MEKIVLLLAIVSLVKSDQICIGYHANNSTEQVDTIMEKNVTVTHAQDILEKTHNGKLCNLDGVKPLILR
DCSVAGWLLGNPMCDEFLNVPEWSYIVEKINPANDLCYPGNFNDYEELKHLLSRINHFEKIQIIPKNSWSDH
EASGMSSACPYQGRSSFFRNVVWLTKKDNAYPTIKRSYNNTNQEDLLVLWGIHHPNDAAEQTRLYQNPTTY
ISVGTSTLNQRLVPKIATRSKVNGQSGRMEFFWTILKSNDAINFESNGNFIAPENAYKIVKKGDSTIMKSEL
EYGNCNTKCQTPIGAINSSMPFHNIHPLTIGECPKYVKSNRLVLATGLRNSPQGERRRKKRGLFGAIAG
FIEGGWQGMVDGWYGYHHSNEQGSGYAADKESTQKAIDGVTNKVNSIIDKMNTQFEAVGREFNNLERRIENL
NKKMEDGFLDVWTYNAELLVLMENERTLDFHDSNVKNLYDKVRLQLRDNAKELGNGCFEFYHRCDNECMESV
RNGTYDYPQYSEEARLKREEISGVKLESIGTYQILSIYSTVASSLALAIMVAGLFLWMCSNGSLQCRICI
>ACT15322 Human Egypt 2009
(SEQ ID NO. 131)
MEKIVLLLAIVSLVKSDQICIGYHANNSTEQVDTIMEKNVTVTHAQDILEKTHNGKLCNLDGVKPLILR
DCSVAGWLLGNPMCDEFLNVPEWSYIVEKINPANDLCYPGNFNDYEELKHLLSRINHFEKIQIIPKNSWSDH
EASGVSSACPYQGRSSFFRNVVWLTKKDNAYPTIKRSYNNTNQEDLLVLWGIHHPNDAAEQTRLYQNPTTY
ISVGTSTLNQRLVPKIATRSKVNGQSGRMEFFWTILKSNDAINFESNGNFIAPENAYKIVKKGDSTIMKSEL
EYGNCNTKCQTPIGAINSSMPFHNIHPLTIGECPKYVKSNRLVLATGLRNSPQGERRRKKRGLFGAIAG
FIEGGWQGMVDGWYGYHHSNEQGSGYAADKESTQKAIDGVTNKVNSIIDKMNTQFEAVGREFNNLESRIENL
NKKMEDGFLDVWTYNAELLVLMENERTLDFHDSNVKNLYDKVRLQLRDNAKELGNGCFEFYHRCDNECMESV
RNGTYDYPQYSEEARLKREEISGVKLESIGTYQILSIYSTVASSLALAIMVAGLFLWMCSNGSLQCRICI
>ACT15324 Human Egypt 2009
(SEQ ID NO. 132)
MEKIVLLLAIVSLVKSDQICIGYHANNSTEQVDTIMEKNVTVTHAQDILEKTHNGKLCNLDGVKPLILR
DCSVAGWLLGNPMCDEFLNVPEWSYIVEKINPANDLCYPGNFNDYEELKHLLSRINHFEKIQIIPKNSWSDH
EASGVSSACPYQGRSSFFRNVVWLTKKNNAYPTIKRSYNNTNQEDLLVLWGIHHPNDAEEQTRLYQNPTTY
ISVGTSTLNQRLVPKIATRSKVNGQSGRMEFFWTILKSNDAINFESNGNFIAPENAYKIVKKGDSTIMKSEL
EYGNCNTKCQTPIGAINSSMPFHNIHPLTIGECPKYVKSNRLVLATGLRNSPQGERRRKKRGLFGAIAG
FIEGGWQGMVDGWYGYHHSNEQGSGYAADKESTQKAIDGVTNKVNSIIDKMNTQFEAVGREFNALERRIENL
NKKMEDGFLDVWTYNAELLVLMENERTLDFHDSNVKNLYDKVRLQLRDNAKELGNGCFEFYHRCDNECMESV
RNGTYDYPQYSEEARLKREEISGVKLESIGTYQILSIYSTVASSLALAIMVAGLFLWMCSNGSLQCRICI
>ACT15326 Human Egypt 2009
(SEQ ID NO. 133)
MEKIVLLLAIVSLVKSDQICIGYHANNSTEQVDTIMEKNVTVTHAQDILEKTHNGKLCNLDGVKPLILR
DCSVAGWLLGNPMCDEFLNVPEWSYIVEKINPANDLCYPGNFNDYEELKHLLSRINHFEKIQIIPKNSWSDH
EASGVSSACPYQGRSSFFRNVVWLTKKDNAYPTIKRSYNNTNQEDLLVLWGIHHPNDAAEQTRLYQNPTTY
ISVGTSTLNQRLIPKIATRSKVNGQSGRMEFFWTILKPNDAINFESNGNFIAPENAYKIVKKGDSTIMKSEL
EYGNCNTKCQTPIGAINSSMPFHNIHPLTIGECPKYVKSNRLVLATGLRNSPQGERRRKKRGLFGAIAG
FIEGGWQGMVDGWYGYHHSNEQGSGYAADKESTQKAIDGVTNKVNSIIDKMNTQFEAVGREFNNLERRIENL
NKKMEDGFLDVWTYNAELLVLMENERTLDFHDSNVKNLYDKVRLQLRDNAKELGNGCFEFYHRCDNECMESV
RNGTYDYPQYSEEARLKREEISGVKLESIGTYQILSIYSTVASSLALAIMVAGLFLWMCSNGSLQCRICI
>ACT15328 Human Egypt 2009
(SEQ ID NO. 134)
MEKIVLLLAIVSLVKSDQICIGYHANNSTEQVDTIMEKNVTVTHAQDILEKTHNGKLCNLDGVKPLILR
DCSVAGWLLGNPMCDEFLNVPEWSYIVEKINPANDLCYPGNFNDYEELKHLLSRINHFEKIQIIPKNSWSDH
EASGVSSACPYQGRSSFFRNVVWLTKKDNAYPTIKRSYNNTNQEDLLVLWGIHHPNDAAEQTRLYQNPTTY
ISVGTSTLNQRLVPKIATRSKVNGQNGRMEFFWTILKSNDAINFESNGNFIAPENAYKIVKKGDSTIMKSEL
EYGNCNTKCQTPIGAINSSMPFHNIHPLTIGECPKYVKSNRLVLATGLRNSPQGERRRKKRGLFGAIAG
FIEGGWQGMVDGWYGYHHSNEQGSGYAADKESTQKAIDGVTNKVNSIIDKMNTQFEAVGREFNNLERRIENL
NKKMEDGFLDVWTYNAELLVLMENERTLDFHDSNVKNLYDKVRLQLRDNAKELGNGCFEFYHRCDNECMESV
RNGTYDYPHYSEEARLKREEISGVKLESIGTYQILSIYSTVASSLALAIMVAGLFLWMCSNGSLQCRICI
>ACT15330 Human Egypt 2009
(SEQ ID NO. 135)
MEKIVLLLAIVSLVKSDQICIGYHANNSTEQVDTIMEKNVTVTHAQDILEKTHNGKLCNLDGVKPLILR
DCSVAGWLLGNPMCDEFLNVPEWSYIVEKINPANDLCYPGNFNDYEELKHLLSRINHFEKIQIIPKNSWSDH
EASGVSSACPYQGRSSFFRNVVWLTKKDNAYPTIKRSYNNTNQEDLLVLWGIHHPNDAAEQTRLYQNPTTY
ISVGTSTLNQRLVPKIATRSKVNGQSGRMEFFWTILKSNDAINFESNGNFIAPENAYKIVKKGDSTIMKSEL
EYGNCNTKCQTPIGAINSSMPFHNIHPLTIGECPKYVKSNRLVLATGLRNSPQGERRRKKRGLFGAIAG
FIEGGWQGMVDGWYGYHHSNEQGSGYAADKESTQKAIDGVTNKVNSIIDKMNTQFEAVGREFNNLERRIENL
NKKMEDGFLDVWTYNAELLVLMENERTLDFHDSNVKNLYDKVRLQLRDNAKELGNGCFEFYHRCDNECMESV
RNGTYDYPHYSEEARLKREEISGVKLESIGTYQILSIYSTVASSLALAIMVAGLFLWMCSNGSLQCRICI
>ACT15334 Human Egypt 2009
(SEQ ID NO. 136)
MEKIVLLLAIVSLVKSDQICIGYHANNSTEQVDTIMEKNVTVTHAQDILEKTHNGKLCNLDGVKPLILR
DCSVAGWLLGNPMCDEFLNVPEWSYIVEKINPANDLCYPGNFNDYEELKHLLSRINHFEKIQIIPKNSWSDH
EASGVSSACPYQGRSSFFRNVVWLTKKDNAYPTIKRSYNNTNQEDLLVLWGIHHPNDAAEQTRLYQNPTTY
ISVGTSTLNQRLVPKIATRSKVNGQSGRMEFFWTILKSNDAINFESNGNFIAPENAYKIVKKGDSTIMKSEL
EYGNCNTKCQTPIGAINSSMPFHNIHPLTIGECPKXVKSNRLVLATGLRNSPQGERRRKKRGLFGAIAG
FIEGGWQGMVDGWYGYHHSNEQGSGYAADKESTQKAIDGVTNKVNSIIDKMNTQFEAVGREFNNLERRIENL
NKKMEDGFLDVWTYNAELLVLMENERTLDFHDSNVKNLYDKVRLQLRDNAKELGNGCFEFYHRCDNECMESV
RNGTYDYPQYSEEARLKREEISGVKLESIGTYQILSIYSTVASSLALAIMMAGLFLWMCSNGSLQCRICI
>ACT15336 Human Egypt 2009
(SEQ ID NO. 137)
MEKIVLLLAIVSLVKSDQICIGYHANNSTEQVDTIMEKNVTVTHAQDILEKTHNGKLCNLDGVKPLILR
DCSVAGWLLGNPMCDEFLNVPEWSYIVEKINPANDLCYPGNFNDYEELKHLLSRINHFEKIQIIPKNSWSDH
EASGVSSACPYQGRSSFFRNVVWLTKKDNAYPTIKRSYNNTNQEDLLVLWGIHHPNDAAEQTRLYQNPTTY
ISVGTSTLNQRLVPKIATRSKVNGQSGRMEFFWTILKSNDAINFESNGNFIAPENAYKIVKKGDSTIMKSEL
EYGNCNTKCQTPIGAINSSMPFHNIHPLTIGECPKYVKSNRLVLATGLRNSPQGERRRKKRGLFGAIAG
FIEGGWQGMVDGWYGYHHSNEQGSGYAADKESTQKAIDGVTNKVNSIIDKMNTQFEAVGREFNNLERRIENL
NKKMEDGFLDVWTYNAELLVLMENERTLDFHDSNVKNLYDKVRLQLRDNAKELGNGCFEFYHRCDNECMESV
RNGTYDYPQYSEEARLKREEISGVKLESIGTYQILSIYSTVASSLALAIMVAGLFLWMCSNGSLQCRICI
>ACT15338 Human Egypt 2009
(SEQ ID NO. 138)
MEKIVLLLAIVSLVKSDQICIGYHANNSTEQVDTIMEKNVTVTHAQDILEKTHNGKLCNLDGVKPLILR
DCSVAGWLLGNPMCDEFLNVPEWSYIVEKINPANDLCYPGNFNDYEELKHLLSRINHFEKIQIIPKNSWSDH
EASGVSSACPYQGRSSFFRNVVWLTKKNNAYPTIKRSYNNTNQEDLLVLWGIHHPNDATEQTRLYQNPTTY
ISVGTSTLNQRLIPKIATRSKVNGQSGRMEFFWTILKSNDAINFESNGNFIAPENAYKIVKKGDSTIMKSEL
EYGNCNTKCQTPIGAINSSMPFHNIHPLTIGECPKYVKSNRLVLATGLRNSPQEGRRRKKRGLFGAIAG
FIEGGWQGMVDGWYGYHHSNEQGSGYAADKESTQKAIDGVTNKVNSIIDKMNTQFEAVGREFNNLERRIENL
NKKMEDGFLDVWTYNAELLVLMENERTLDFHDSNVKNLYDKVRLQLRDNAKELGNGCFEFYHRCDNECMESV
RNGTYDYPQYSEEARLKREEISGVKLESIGTYQILSIYSTVASSLALAIMVAGLFLWMCSNGSLQCRICI
>ACT15340 Human Egypt 2009
(SEQ ID NO. 139)
MEKIVLLLAIVSLVKSDQICIGYHANNSTEQVDTIMEKNVTVTHAQDILEKTHNGKLCNLDGVKPLILR
DCSVAGWLLGNPMCDEFLNVPEWSYIVEKINPANDLCYPGNFNDYEELKHLLSRINHFEKIQIIPKNSWSDH
EASGVSSACPYQGRSSFFRNVVWLTKKNNAYPTIKRSYNNTNQEDLLVLWGIHHPNDAEEQTRLYQNPTTY
ISVGTSTLNQRLVPKIATRSKVNGQSGRMEFFWTILKSNDAINFESNGNFIAPENAYKIVKKGDSTIMKSEL
EYGNCNTKCQTPIGAINSSMPFHNIHPLTIGECPKYVKSNRLVLATGLRNSPQGERRRKKRGLFGAIAG
FIEGGWQGMVDGWYGYHHSNEQGSGYAADKESTQKAIDGVTNKVNSIIDKMNTQFEAVGREFNALERRIENL
NKKMEDGFLDVWTYNAELLVLMENERTLDFHDSNVKNLYDKVRLQLRDNAKELGNGCFEFYHRCDNECMESV
RNGTYDYPQYSEEARLKREEISGVKLESIGTYQILSIYSTVASSLALAIMVAGLFLWMCSNGSLQCRICI
>ACT15342 Human Egypt 2009
(SEQ ID NO. 140)
MEKIVLLLAIVSLVKSDQICIGYHANNSTEQVDTIMEKNVTVTHAQDILEKTHNGKLCNLDGVKPLILR
DCSVAGWLLGNPMCDEFLNVPEWSYIVEKINPANDLCYPGSFNDYEELKHLLSRINHFEKIQIIPKNSWSDH
EASGVSSACPYQGRSSFFRNVVWLTKKDNAYPTIKRSYNNTNQEDLLVLWGIHHPNDAAEQTRLYQNPTTY
ISVGTSTLNQRLVPKIATRSKVNGQSGRMEFFWTILKPNDAINFESNGNFIAPENAYKIVKKGDSTIMKSEL
EYGNCNTKCQTPIGAINSSMPFHNIHPLTIGECPKYVKSNRLILATGLRNSPQGERRRKKRGLFGAIAG
FIEGGWQGMVDGWYGYHHSNEQGSGYAADKESTQKAIDGVTNKVNSIIDKMNTQFEAVGREFNNLERRIENL
NKKMEDGFLDVWTYNAELLVLMENERTLDFHDSNVKNLYDKVRLQLRDNAKELGNGCFEFYHRCDNECMESV
RNGTYDYPQYSEEARLKREEISGVKLESIGTYQILSIYSTVASSLALAIMVAGLFLWMCSNGSLQCRICI
>ACT15343 Human Egypt 2009
(SEQ ID NO. 141)
MEKIVLLLAIVSLVKSDQICIGYHANNSTEQVDTIMEKNVTVTHAQDILEKTHNGKLCNLDGVKPLILR
DCSVAGWLLGNPMCDEFLNVPEWSYIVEKINPANDLCYPGNFNDYEELKHLLSRINHFEKIQIIPKNSWSDH
EASGVSSACPYQGRSSFFRNVVWLTKKDNAYPTIKRSYNNTNQEDLLVLWGIHHPNDAAEQTRLYQNPTTY
ISVGTSTLNQRLVPKIATRSKVNGQSGRMEFFWTILKSNDAINFESNGNFIAPENAYKIVKKGDSTIMKSEL
EYGNCNTKCQTPIGAINSSMPFHNIHPLTIGECPKYVKSNRLVLATGLRNSPQGERRRKKRGLFGAIAG
FIEGGWQGMVDGWYGYHHSNEQGSGYAADKESTQKAIDGVTNKVNSIIDKMNTQFEAVGREFNNLERRIENL
NKKMEDGFLDVWTYNAELLVLMENERTLDFHDSNVKNLYDKVRLQLRDNAKELGNGCFEFYHRCDNECMESV
RNGTYDYPQYSEEARLKREEISGVKLESIGTYQILSIYSTVASSLALAIMVAGLFLWMCSNGSLQCRICI
>ACT15345 Human Egypt 2009
(SEQ ID NO. 142)
MEKIVLLLAIVSLVKSDQICIGYHANNSTEQVDTIMEKNVTVTHAQDILEKTHNGKLCNLDGVKPLILR
DCSVAGWLLGNPMCDEFLNVPEWSYIVEKINPANDLCYPGNFNDYEELKHLLSRINHFEKIQIIPKNSWSDH
EASGVSSSCPYQGRSSFFRNVVWLTKKDNAYPTIKRSYNNTNQEDLLVLWGIHHPNDAAEQTRLYQNPTTY
ISVGTSTLNQRLVPKIATRSKVNGQSGRMEFFWTILKSNDAINFGSNGNFIAPENAYKIVKKGDSTIMKSEL
EYGNCNTKCQTPIGAINSSMPFHNIHPLTIGECPKYVKSNRLVLATGLRNSPQGERRRKKRGLFGAIAG
FIEGGWQGMVDGWYGYHHSNEQGSGYAADKESTQKAIDGVTNKVNSIIDKMNTQFEAVGREFNNLERRIENL
NKKMEDGFLDVWTYNAELLVLMENERTLDFHDSNVKNLYDKVRLQLRDNAKELGNGCFEFYHRCDNECMESV
RNGTYDYPQYSEEARLKREEISGVKLESIGTYQILSIYSTVASSLALAIMVAGLFLWMCSNGSLQCRICI
>ACT15349 Human Egypt 2009
(SEQ ID NO. 143)
MEKIVLLLAIVSLVKSDQICIGYHANNSTEQVDTIMEKNVTVTHAQDILEKTHNGKLCNLDGVKPLILR
DCSVAGWLLGNPMCDEFLNVPEWSYIVEKINPANDLCYPGNFNDYEELKHLLSRINHFEKIQIIPKNSWSDH
EASGVSSACPYQGRSSFFRNVVWLTKKDNAYPTIKRSYNNTNQEDLLVLWGIHHPNDATEQTRLYQNPTTY
ISVGTSTLNQRLIPKIATRSKVNGQSGRMEFFWTILKSNDAINFESNGNFIAPENAYKIVKKGDSTIMKSEL
EYGNCNTKCQTPIGAINSSMPFHNIHPLTIGECPKYVKSNRLVLATGLRNSPQEERRRKKRGLFGAIAG
FIEGGWQGMVDGWYGYHHSNEQGSGYAADKESTQKAIDGVTNKVNSIIDKMNTQFEAVGREFNNLERRIENL
NKKMEDGFLDVWTYNAELLVLMENERTLDFHDSNVKNLYDKVRLQLRDNAKELGNGCFEFYHRCDNECMESV
RNGTYDYPQYSEEARLKREEISGVKLESIGTYQILSIYSTVASSLALAIMVAGLFLWMCSNGSLQCRICI
>ACT15353 Human Egypt 2009
(SEQ ID NO. 144)
MEKIVLLLAIVSLVKSDQICIGYHANNSTEQVDTIMEKNVTVTHAQDILEKTHNGKLCNLDGVKPLILR
DCSVAGWLLGNPMCDEFLNVPEWSYIVEKINPANDLCYPGNFNDYEELKHLLSRINHFEKIQIIPKNSWSDH
EASGVSSACPYQGRSSFFRNVVWLTKKNSAYPTIKRSYNNTNQEDLLVLWGIHHPNDAAEQTRLYQNPTTY
ISVGTSTLNQRLVPKIATRSKVNGQSGRMEFFWTILKSNDAINFESNGNFIAPENAYKIVKKGDSTIMKSEL
EYSNCNTKCQTPIGAINSSMPFHNIHPLTIGECPKYVKSNRLVLATGLRNSPQGERRRKKRGLFGAIAG
FIEGGWQGMVDGWYGYHHSNEQGSGYAADKESTQKAIDGVTNKVNSIIDKMNTQFEAVGREFNNLERRIENL
NKKMEDGFLDVWTYNAELLVLMENERTLDFHDSNVKNLYDKVRLQLRDNAKELGNGCFEFYHRCDNECMESV
RNGTYDYPQYSEEARLKREEISGVKLESIGTYQILSIYSTVASSLALAIMVAGLFLWMCSNGSLQCRICI
>ACT15357 Human Egypt 2009
(SEQ ID NO. 145)
MEKIVLLLAIVSLVKSDQICIGYHANNSTEQVDTIMERNVTVTHAQDILEKTHNGKLCNLDGVKPLILR
DCSVAGWLLGNPMCDEFLNVPEWSYIVEKINPANDLCYPGNFNDYEELKHLLSRINHFEKIQIIPKNSWSDH
EASGVSSACPYQGRSSFFRNVVWLTQKDNAYPTIKRSYNNTNQEDLLVLWGIHHPNDAAEQTRLYQNPTTY
ISVGTSTLNQRLIPKIATRSKVNGQSGRMEFFWTILKSNDAINFESNGNFIAPENAYKIVKKGDSTIMKSEL
EYGNCNTKCQTPIGAINSSMPFHNIHPLTIGECPKYVKSNRLVLATGLRNSPQGERRRKKRGLFGAIAG
FIEGGWQGMVDGWYGYHHSNEQGSGYAADKESTQKAIDGVTNKVNSIIDKMNTQFEAVGREFNNLERRIENL
NKKMEDGFLDVWTYNAELLVLMENERTLDFHDSNVKNLYDKVRLQLRDNAKELGNGCFEFYHRCDNECMESV
RNGTYDYPQYSEEARLKREEISGVKLESIGTYQILSIYSTVASSLALAIMVAGLFLWMCSNGSLQCRICI
>ABY79033 Avian Egypt 2007
(SEQ ID NO. 146)
MEKIVLLLAIVSLVKSDQICIGYHANNSTEQVDTIMEKNVTVTHAQDILEKTHNGKLCNLDGVKPLIL
RDCSVAGWLLGNPMCDEFLNVPEWSYIVEKINPANDLCYPGNFNDYEELKHLLSRINHFEKIKIIPKNSWSD
HEASGVSSACPYQGRSSFFRNVVWLTKKDNAYPTIKRSYNNTNQEDLLVLWGIHHPNDAAEQTRLYQNPTT
YISVGTSTLNQRLVPKIATRSKVNGQSGRMEFFWTILKSNDAINFESNGNFIAPENAYKIVKKGDSTIMKSE
LEYGNCNTKCQTPIGAINSSMPFHNIHPLTIGECPKYVKSNRLVLATGLRNSPQGERRRKKRGLFG
AIAGFIEGGWQGMVDGWYGYHHSNEQGSGYAADKKSTQKAIDGVTNKVNSIIDKMNTQFEAVGREFNNLERR
IENLNKKMEDGFLDVWTYNAELLVLMENERTLDFHDSNVKNLYDKVRLQLRDNAKELGNGCFEFYHRCDNEC
MESVRNGTYDYPQYSEEAKLKREEISGVKLESIGTYQILSIYSTVASSLALAIMVAGLFLWMCSNGSLQCRI
CI
>ABW37432 Avian Egypt 2007
(SEQ ID NO. 147)
MEKIVLLLAIVSLVKSDQICIGYHANNSTEQVDTIMEKNVTVTHAQDILEKTHNGKLCNLDGVKPLIL
RDCSVAGWLLGNPMCDEFLNVPEWSYIVEKINPANDLCYPGNFNDYEELKHLLSRINHFEKIQIIPKNSWSD
HEASGVSSACPYQGRSSFFRNVVWLTKKDNAYPTIKRSYNNTNQEDLLVLWGIHHPNDAAEQTRLYQNPTT
QISVGTSTLNQRLVPKIATRSKVNGQSGRMEFFWTILKSNDAINFESNGNFIAPENAYKIVKKGDSTIMKSE
LEYGNCNTKCQTPIGAINSSMPFHNIHPLTIGECPKYVKSNRLVLATGLRNSPQGERRRKRRGLFG
AIAGFIEGGWQGMVDGWYGYHHSNEQGSGYAADKESTQKAIDGVTNKVNSIIDKMNTQFEAVGREFNNLERR
IENLNKKMEDGFLDVWTYNAELLVLMENERTLDFHDSNVKNLYDKVRLQLRDNAKELGNGCFEFYHRCDNEC
MESVRNGTYDYPQYSEEARLKREEISGVKLESIGTYQILSIYSTVASSLALAIMVAGLFLWMCSNGSLQCRI
CI
>ABW37433 Avian Egypt 2007
(SEQ ID NO. 148)
MEKIVLLLAIVSLVESDQICIGYHANNSTEQVDTIMEKNVTVTHAQDILEKTHNGKLCNLDGVKPLIL
RDCSVAGWLLGNPMCDEFLNVPEWSYIVEKINPANDLCYPGNFNDYEELKHLLSRINHFEKIQIIPKNSWSD
HEASGVSSACPYQGRSSFFRNVVWLTKKDNAYPTIKRSYNNTNQEDLLVLWGIHHPNDAAEQTRLYQNPTT
YISVGTSTLNQRLVPKIATRSKVNGQSGRMEFFWTILKSNDAINFESNGNFIAPENAYKIVKKGDSTIMKSE
LEYGNCNTKCQTPIGAINSSMPFHNIHPLTIGECPKYVKSNRLVLATGLRNSPQGERRRKKRGLFG
AIAGFIEGGWQGMVDGWYGYHHSNEQGSGYAADKESTQKAIDGVTNKVNSIIDKMNTQFEAVGREFNNLERR
IENLNKKMEDGFLDVWTYNAELLVLMENERTLDFHDSNVKNLYDKVRLQLRDNAKELGNGCFEFYHRCDNEC
MESVRNGTYDYPQYSEEARLKREEISGVKLESIGTYQILSIYSTVASSLALAIMVAGLFLWMCSNGSLQCRI
CI
>ABW37434 Avian Egypt 2007
(SEQ ID NO. 149)
MEKIVLLLAIVSLVKSDQICIGYHANNSTEQVDTIMEKNVTVTHAQDILEKTHNGKLCNLDGVKPLIL
RDCSVAGWLLGNPMCDEFLNVPEWSYIVEKINPANDLCYPGNFNDYEELKHLLSRINHFEKIQIIPKNSWSD
HEASGVSSACPYQGRSSFFRNVVWLTKKDNAYPTIKRSYNNTNQEDLLVLWGIHHPNDAAEQTRLYQNPTT
YISVGTSTLNQRLVPKIATRSKVNGQSGRMEFFWTILKSNDAINFESNGNFIAPENAYKIVKKGDSTIMKSE
LEYGNCNTKCQTPIGAINSSMPFHNIHPLTIGECPKYVKSNRLVLATGLRNSPQGKRRRKKRGLFG
AIAGFIEGGWQGMVDGWYGYHHSNEQGSGYAADKESTQKAIDGVTNKVNSIIDKMNTQFEAVGREFNNLERR
IENLNKKMEDGFLDVWTYNAELLVLMENERTLDFHDSNVKNLYDKVRLQLRDNAKELGNGCFEFYHRCDNEC
MESVRNGTYDYPQYSEEARLKREEISGVKLESIGTYQILSIYSTVASSLALAIMVAGLFLWMCSNGSLQCRI
CI
>ABW37435 Avian Egypt 2007
(SEQ ID NO. 150)
MEKIVLLLAIVSLVKSDQICIGYHANNSTEQVDTIMEKNVTVTHAQDILEKTHNGKLCNLDGVKPLIL
RDCSVAGWLLGNPMCDEFLNVPEWSYIVEKINPANDLCYPGNFNDYEELKHLLSRINHFEKIQIIPKNSWSD
HEASGVSSACPYQGRSSFFRNVVWLTKKDNAYPTIKRSYNNTNQEDLLVLWGIHHPNDAAEQTRLYQNPTT
YISVGTSTLNQRLVPKIATRSKVNGQSGRMEFFWTILKSNDAINFESNGNFIAPENAYKIVKKGDSTIMKSE
LEYGNCNTKCQTPIGAINSSMPFHNIHPLTIGECPKYVKSNRLVLATGLRNSPQGERRRKKRGLFG
AIAGFIEGGWQGMVDGWYGYHHSNEQGSGYAADKESTQKAIDGVTNKVNSIIDKMNTQFEAVGREFNNLERR
IENLNKKMEDGFLDVWTYNAELLVLMENERTLDFHDSNVKNLYDKVRLQLRDNAKELGNGCFEFYHRCDNEC
MESVRNGTYDYPQYSEEARLKREEISGVKLESIGTYQILSIYSTVVSSLALAIMVAGLFLWMCSNGSLQCRI
CI
>ABW37436 Avian Egypt 2007
(SEQ ID NO. 151)
MEKIVLLLAIVSVVKSDQICIGYHANYSTEQVDTIMEKDVIVTHAQDILEKTHNGKLCNLEGMKPLIL
RDCSVAGWLLGNPMCDEFHNVPEWSYIVEKINPANDLCYPGNFDDYEELQHLFSRINHFEKIQIIPKNCWSD
HEASGVSSACPYQGRSSFFRNVVWLTKKDNAYPTIKRSYNNTNQEDLLVLWGIHHPNDAAEQTRLYQNPTT
YISVGTSTLNQRLVPKIATRSKVNGQSGRMEFFWTILKSNDAINFESNGNFIAPENAYKIVKKGDSTIMKSE
LEYGNCNTKCQTPIGAINSSMPFHNIHPLTIGECPKYVKSNRLVLATGLRNSPQGKRRRKKRGLFG
AIAGFIEGGWQGMVDGWYGYHHSNEQGSGYAADKESTQKAIDGVTNKVNSIIDKMNTQFEAVGREFNNLERR
IENLNKKMEDGFLDVWTYNAELLVLMENERTLDFHDSNVKNLYDKVRLQLRDNAKEFGNGCFEFYHRCDNEC
MESVRNGTYDYPQYSEEARLKREEISGVKLESIGTYQILSIYSTVASSLALAIMVAGLFLWMCSNGSLQCRI
CI
>ACR56233 Avian Egypt 2008
(SEQ ID NO. 152)
MEKIMLLLAIVSLVKGDQICIGYHANNSTEQVDTIMEKNVTVTHAQDILEKTHNGKLCNLDGVKPLIL
RDCSVAGWLLGNPMCDEFLNVPEWSYIVEKINPANDLCYPGNFNDYEELKHLLSRINHFEKIQIIPKNSWSD
HEASGVSSACPYQGRSSFFRNVVWLTKKDNAYPTIKRSYNNTNQEDLLVLWGIHHPNDAAEQTKLYQNPTT
YISVGTSTLNQRLVPKIATRSKVNGQSGRMEFFWTILKSNDAINFESNGNFIAPENAYKIVKKGDSTIMKSE
LEYGNCNTKCQTPIGAINSSMPFHNIHPLTIGECPKYVKSNRLVLATGLRNSPQGERRRKKRGLFG
AIVGFIEGGWQGMVDGWYGYHHSNEQGSGYAADKESTQKAIDGVTNKVNSIIDKMNTQFEAVGREFNNLERR
IENLNKKMEDGFLDVWTYNAELLVLMENERTLDFHDSNVKNLYDKVRLQLRDNAKELGNGCFEFYHRCDNEC
MESVRNGTYDYPQYSEEARLKREEISGVKLESIGTYQILSIYSTVASSLALAIMVAGLFLWMCSNGSLQCRI
CI
>ACR56248/1552 Avian Egypt 2008
(SEQ ID NO. 153)
MEKIVLLLAIVSLVKSDQICIGYHANNSTEQVDTIMEKNVTVTHAQDILEKTHNGKLCNLDGVKPLIL
RDCSVAGWLLGNPMCDEFLNVPEWSYIVEKINPANDLCYPGNFNDYEELKHLLSRINHFEKIQIIPKNSWSD
HEASGVSSACPYQGRSSFFRNVVWLTKKDNAYPTIKRSYNNTNQEDLLVLWGIHHPNDAAEQTRLYQNPTT
YISVGTSTLNQRLVPKIATRSKVNGQSGRMEFFWTILKSNDAINFESNGNFIAPENAYKIVKKGDSTIMKSE
LEYSNCNTKCQTPIGAINSSMPFHNIHPLTIGECPKYVKSNRLVLATGLRNSPQGERRRKKRGLFG
AIAGFIEGGWQGMVDGWYGYHHSNEQGSGYAADKESTQKAIDGVTNKVNSIIDKMNTQFEAVGREFNNLERR
IENLNKKMEDGFLDVWTYNAELLVLMENERTLDFHDSNVKNLYDKVRLQLRDNAKELGNGCFEFYHRCDNEC
MESVRNGTYDYPQYSEEARLKREEISGVKLESIGTYQILSIYSTVASSLALAIMVAGLF
>ACR56246 Avian Egypt 2008
(SEQ ID NO. 154)
MEKIVLLLAIVSLVKSDQICIGYHANNSTEQVDTIMEKNVTVTHAQDILEKTHNGKLCNLDGVKPLIL
RDCSVAGWLLGNPMCDEFLNVPEWSYIVEKINPANDLCYPGNFNDYEELKHLLSRINHFEKIQIIPKNSWSD
HEASGVSSACPYQGRSSFFRNVVWLTKKDNAYPTIKRSYNNTNQEDLLVLWGIHHPNDAAEQTRLYQNPTT
YISVGTSTLNQRLVPKIATRSKVNGQSGRMEFFWTILKSNDAINFESNGNFIAPENAYKIVKKGDSTIMKSE
LEYGNCNTKCQTPIGAINSSMPFHNIHPLTIGECPKYVKSNRLVLATGLRNSPQGERRRKKRGLFG
AIAGFIEGGWQGMVDGWYGYHHSNEQGSGYAADKESTQKAIDGVTNKVNSIIDKMNTQFEAVGREFNNLERR
IENLNKKMEDGFLDVWTYNAELLVLMENERTLDFHDSNVKNLYDKVRLQLRDNAKELGNGCFEFYHRCDNEC
MESVRNGTYDYPQYSEEARLKREEISGVKLESIGTYQILSIYSTVASSLALAIMVAGLFLWMCSNGSLQCRI
CI
>AEA92628 Avian Egypt 2008
(SEQ ID NO. 155)
MEKIVLLLAIVSLVKSDQICIGYHANNSTEQVDTIMEKNVTVTHAQDILEKTHNGKLCNLDGVKPLIL
RDCSVAGWLLGNPMCDEFLNVPEWSYIVEKINPANDLCYPGNFNDYEELKHLLSRINHFEKIQIIPKNSWSD
HETSGVSSACPYQGRSSFFRNVVWLTKKDNAYPTIKRSYNNTNQEDLLVLWGIHHPNDXAEQTRLYQNPTT
YISVGTSTLNQRLVPKIATRSKVNGQSGRMEFFWTILKSNDAINFESNGNFIAPENAYKIVKKGDSTIMKSE
LEYSNCNTKCQTPIGAINSSMPFHNIHPLTIGECPKYVKSNRLVLATGLRNSPQGERRRKKRGLFG
AIAGFIEGGWQGMVDGWYGYHHSNEQGSGYAADKESTQKAIDGVTNKVNSIIDKMNTQFEAVGREFNNLERR
IENLNKKMEDGFLDVWTYNAELLVLMENERTLDFHDSNVKNLYDKVRLQLRDNAKELGNGCFEFYHKCDNEC
MESVRNGTYDYPQYSEEARLKREEISGVKLESIGTYQILSIYSTVASSLALAIMVAGLFLWMCSNGSLQCRI
CI
>ACR56247 Avian Egypt 2008
(SEQ ID NO. 156)
MEKIVLLLAIVSLVKSDQICIGYHANNSTEQVDTIMEKNVTVTHAQDILEKAHNGKLCNLDGVKPLIL
RDCSVAGWLLGNPMCDEFLNVPEWSYIVEKINPANDLCYPGNFNDYEELKHLLSRINHFEKIQIIPKNSWSD
HEASGVSSACPYQGRSSFFRNVVWLTKKDNAYPTIKRSYNNTNQEDLLILWGIHHPNDAAEQTRLYQNPTT
YISVGTSTLNQRLVPKIATRSKVNGQSGRMEFFWTILKSNDAINFESNGNFIAPENAYKIVKKGDSTIMKSE
LEYGNCNTKCQTPIGAINSSMPFHNIHPLTIGECPKYVKSNRLVLATGLRNSPQGERRRKKRGLFG
AIAGFIEGGWQGMVDGWYGYHHSNEQGSGYAADKESTQKAIDGVTNKVNSIIDKMNTQFEAVGREFNNLERR
IENLNKKMEDGFLDVWTYNAELLVLMENERTLDFHDSNVKNLYDKVRLQLRDNAKELGNGCFEFYHRCDNEC
MESVRNGTYDYPQYSEEARLKREEISGVKLESIGTYQILSIYSTVASSLALAIMVAGLFLWMCSNGSLQCRI
CI
>ACX31965 Avian Egypt 2009
(SEQ ID NO. 157)
MEKIVLLLAIVSLVKSDQICIGYHANNSTEQVDTIMEKNVTVTHAQDILEKTHNGKLCNLDGVKPLIL
RDCSVAGWLLGNPMCDEFLNVPEWSYIVEKINPANDLCYPGNFNDYEELKHLLSRINHFEKIQIIPKNSWSD
HEASGVSSACPYQGRSSFFRNVVWLTKKDNAYPTIKRSYNNTNQEDLLVLWGIHHPNDAAEQTRLYQNPTT
YISVGTSTLNQRLVPKIATRSKVNGQSGRMEFFWTILKSNDAINFESNGNFIAPENAYKIVKKGDSTIMKSE
LEYSNCNTKCQTPIGAINSSMPFHNIHPLTIGECPKYVKSNRLVLATGLRNSPQGERRRKKRGLFG
AIAGFIEGGWQGMVDGWYGYHHSNEQGSGYAADKESTQKAIDGVTNKVNSIIDKMNTQFEAVGREFNNLERR
IENLNKKMEDGFLDVWTYNAELLVLMENERTLDFHDSNVKNLYDKVRLQLRDNAKELGNGCFEFYHRCDNEC
MESVRNGTYDYPQYSEEARLKREEISGVKLESIGTYQILSIYSTVASSLALAIMVAGLFLWMCSNGSLQCRI
CI
>ADD21353/1565 Avian Egypt 2009
(SEQ ID NO. 158)
MEKIVLLLAIVSLVKSDQICIGYHANNSTEQVDTIMEKNVTVTHAQDILEKTHNGKLCNLDGVKPLIL
RDCSVAGWLLGNPMCDEFLNVPEWSYIVEKINPANDLCYPGNFNDYEELKHLLSRINHFEKIQIIPKNSWSD
HEASGVSSACPYQGRSSFFRNVVWLTKKDNAYPTIKRSYNNTNQEDLLVLWGIHHPNDAAEQTRLYQNPTT
YISVGTSTLNQRLVPKIATRSKVNGQSGRMEFFWTILKSNDAINFESNGNFIAPENAYKIVKKGDSTIMKSE
LEYGNCNTKCQTPIGAINSSMPFHNIHPLTIGECPKYVKSNRLVLATGLRNSPQGERRRKKRGLFG
AIAGFIEGGWQGMVDGWYGYHHSNEQGSGYAADKESTQKAIDGVTNKVNSIIDKMNTQFEAVGREFNNLERR
IENLNKKMEDGFLDVWTYNAELLVLMENERTLDFHDSNVKNLYDKVRLQLRDNAKELGNGCFEFYHRCDNEC
MESVRNGTYDYPQYSEEARLKREEISGVKLESIGTYQILSIYSTVASSLALAIMVAGLFLWMCSNGSLQCRI
>ADD21367/1565 Avian Egypt 2009
(SEQ ID NO. 159)
MEKIVLLLAIVSLVKSDQICIGYHANNSTEQVDTIMEKNVTVTHAQDILEKTHNGKLCNLDGVKPLIL
RDCSVAGWLLGNPMCDEFLNVPEWSYIVEKINPANDLCYPGNFNDYEELKHLLSRINHFEKIQIIPKNSWSD
HEASGVSSACPYQGRSSFFRNVVWLTKKDNAYPTIKRSYNNTNQEDLLVLWGIHHPNDAAEQTRLYQNPTT
YISVGTSTLNQRLVPKIATRSKVNGQSGRMEFFWTILKSNDAINFESNGNFIAPENAYKIVKKGDSTIMKSE
LEYSNCNTKCQTPIGAINSSMPFHNIHPLTIGECPKYVKSNRLVLATGLRNSPQGERRRKKRGLFG
AIAGFIEGGWQGMVDGWYGYHHSNEQGSGYAADKESTQKAIDGVTNKVNSIIDKMNTQFEAVGREFNNLERR
IENLNKKMEDGFLDVWTYNAELLVLMENERTLDFHDSNVKNLYDKVRLQLRDNAKELGNGCFEFYHRCDNEC
MESVRNGTYDYPQYSEEARLKREEISGVKLESIGTYQILSIYSTVASSLALAIMVAGLFLWMCSNGSLQCRI
>ADD21378/1565 Avian Egypt 2009
(SEQ ID NO. 160)
MEKIVLLLAIVSLVKSDQICIGYHANNSTEQVDTIMEKNVTVTHAQDILEKTHNGKLCNLDGVKPLIL
RDCSVAGWLLGNPMCDEFLNVPEWSYIVEKSNPANDLCYPGNFNDYEELKHLLSRINHFEKIQIIPKNSWSD
HEASGVSSACPYQGRSSFFRNVVWLTKKDNAYPTIKRSYNNTNQEDLLVLWGIHHPNDAAEQTRLYQNPTT
YISVGTSTLNQRLVPKIATRSKVNGQSGRMEFFWTILKSNDAINFESNGNFIAPENAYKIVKKGDSTIMKSE
LEYGNCNTKCQTPIGAINSSMPFHNIHPLTIGECPKYVKSNRLVLATGLRNSPQGERRRKKRGLFG
AIAGFIEGGWQGMVDGWYGYHHSNEQGSGYAADKESTQKAIDGVTNKVNSIIDKMNTQFEAVGREFNNLERR
IENLNKKMEDGFLDVWTYNAELLVLMENERTLDFHDSNVKNLYDKVRLQLRDNAKELGNGCFEFYHRCDNEC
MESVRNGTYDYPQYSEEARLKREEISGVKLESIGTYQILSIYSTVASSLALAIMVAGLFLWMCSNGSLQCRI
>ACX31969 Avian Egypt 2009
(SEQ ID NO. 161)
MKKIVLLLAIVTLVKSDQICIGYHANNSTEQVDTIMEKNVTVTHAQDILEKTHNGKLCNLDGVKPLIL
RDCSVAGWLLGNPMCDEFLNVPEWSYIVEKINPANDLCYPGNFNDYEELKHLLSRINHFEKIQIIPKNSWSD
HEASGVSSACPYQGRSSFFRNVVWLTKKDNAYPTIKRSYNNTNQEDLLVLWGIHHPNDAAEQTRLYQNPTT
YISVGTSTLNQRLVPKIATRSKVNGQSGRMEFFWTILKSNDAINFESNGNFIAPENAYKIVKKGDSTIMKSE
LEYGNCNTKCQTPIGAINSSMPFHNIHPLTIGECPKYVKSNRLVLATGLRNSPQGERRRKKRGLFG
AIAGFIEGGWQGMVDGWYGYHHSNEQGSGYAADKESTQKAIDGVTNKVNSIIDKMNTQFEAVGREFNNLERR
IENLNKKMEDGFLDVWTYNAELLVLMENERTLDFHDSNVKNLYDKVRLQLRDNAKELGNGCFEFYHRCDNEC
MESVRNGTYDYPQYSEEARLKREEISGVKLESIGTYQILSIYSTVASSLALAIMVAGLSLWMCSNGSLQCRI
CI
>ACX31970 Avian Egypt 2009
(SEQ ID NO. 162)
MEKIVLLLAIVSLVKSDQICIGYHANNSTEQVDTIMEKNVTVTHAQDILEKTHNGKLCNLDGVKPLIL
RDCSVAGWLLGNPMCDEFLNVPEWSYIVEKINPANDLCYPGNFNDYEELKHLLSRINHFEKIQIIPKSSWSD
HEASGVSSACPYQGRSSFFRNVVWLTKKDNAYPTIKRSYNNTNQEDLLVLWGIHHPNDAAEQTRLYQNPTT
YISVGTSTLNQRLVPKIATRSKVNGQSGRMEFFWTILKSNDAINFESNGNFIAPENAYKIVKKGDSTIMKSE
LEYGNCNTKCQTPIGAINSSMPFHNIHPLTIGECPKYVKSNRLVLATGLRNSPQGERRRKKRGLFG
AIAGFIEGGWQGMVDGWYGYHHSNEQGSGYAADKESTQKAIDGVTNKVNSIIDKMNTQFEAVGREFNNLERR
IENLNKKMEDGFLDVWTYNAELLVLMENERTLDFHDSNVKNLYDKVRLQLRDNAKELGNGCFEFYHRCDNEC
MESVRNGTYDYPQYSEEARLKREEISGVKLESIGTYQILSIYSTVASSLALAIMVAGLFLWMCSNGSLQCRI
CI
>ACX31978 Avian Egypt 2009
(SEQ ID NO. 163)
MEKIVLLLAIVSLVKSDQICIGYHANNSTEQVDTIMEKNVTVTHAQDILEKTHNGKLCNLDGVKPLIL
RDCSVAGWLLGNPMCDEFLNVPEWSYIVEKINPANDLCYPGNFNDYEELKHLLSRINHFEKIQIIPKNSWSD
HEASGVSSACPYQGRSSFFRNVVWLTKKDNAYPTIKRSYNNTNQEDLLVLWGIHHPNDAAEQTRLYQNPTT
YISVGTSTLNQRLIPKIATRSKVNGQSGRMEFFWTILKSNDAINFESNGNFIAPENAYKIVKKGDSTIMKSE
LEYGNCNTKCQTPIGAINSSMPFHNIHPLTIGECPKYVKSNRLVLATGLRNSPQGERRRKKRGLFG
AIAGFIEGGWQGMVDGWYGYHHSNEQGSGYAADKESTQKAIDGVTNKVNSIIDKMNTQFEAVGREFNNLERR
IENLNKKMEDGFLDVWTYNAELLVLMENERTLDFHDSNVKNLYDKVRLQLRDNAKELGNGCFEFYHRCDNEC
MESVRNGTYDYPQYSEEARLKREEISGVKLESIGTYQILSIYSTVASSLALAIMVAGLFLWMCSNGSLQCRI
CI
>ACX31989 Avian Egypt 2009
(SEQ ID NO. 164)
MEKIVLLLAIVSLVKSDQICIGYHANNSTEQVDTIMEKNVTVTHAQDILEKTHNGKLCNLDGVKPLIL
RDCSVAGWLLGNPMCDEFLNVPEWSYIVEKINPANDLCYPGNFNDYEELKHLLSRINHFEKIQIIPKNSWSD
HEASGVSSACPYQGRSSFFRNVVWLTKKNSAYPTIKRSYNNTNQEDLLVLWGIHHPNDAAEQTRLYQNPTT
YISVGTSTLNQRLVPKIATRSKVNGQSGRMEFFWTILKSNDAINFESNGNFIAPENAYKIVKKGDSTIMKSE
LEYSNCNTKCQTPIGAINSSMPFHNIHPLTIGECPKYVKSNRLVLATGLRNSPQGERRRKKRGLFG
AIAGFIEGGWQGMVDGWYGYHHSNEQGSGYAADKESTQKAIDGVTNKVNSIIDKMNTQFEAVGREFNNLERR
IENLNKKMEDGFLDVWTYNAELLVLMENERTLDFHDSNVKNLYDKVRLQLRDNAKELGNGCFEFYHRCDNEC
MESVRNGTYDYPQYSEEARLKREEISGVKLESIGIYQILSIYSTVASSLALAIMVAGLFLWMCSNGSLQCRI
CI
>ACX31993 Avian Egypt 2009
(SEQ ID NO. 165)
MEKIVLLLAIVSIVKSDQICIGYHANNSTEQVDTIMEKNVTVTHAQDILEKTHNGKLCNLDGVKPLIL
RDCSVAGWLLGNPMCDEFLNVPEWSYIVEKINPANDLCYPGNFNDYEELKHLLSRINHFEKIQIIPKNSWSD
HEASGVSSACPYQGRSSFFRNVVWLTKKNNAYPTIKRSYNNTNQEDLLVLWGIHHPNDAAEQTRLYQNPTT
YISVGTSTLNQRLVPKIATRSKVNEQSGRMEFFWTILKSNDAINFESNGNFIAPENAYKIVKKGDSTIMKSE
LEYGNCNTKCQTPIGAINSSMPFHNIHPLTIGECPKYVKSNRLVLATGLRNSPQGERRRKKRGLFG
AIAGFIEGGWQGMVDGWYGYHHSNEQGSGYAADKESTQKAIDGVTNKVNSIIDKMNTQFEAVGREFNNLERR
IENLNKKMEDGFLDVWTYNAELLVLMENERTLDFHDSNVKNLYDKVRLQLRDNAKELGNGCFEFYHRCDNEC
MESVRNGTYDYPQYSEEARLKREEISGVKLESIGTYQILSIYSTVASSLALAIMVAGLFLWMCSNGSLQCRI
CI
>ADD21354/1565 Avian Egypt 2009
(SEQ ID NO. 166)
MEKIVLLLAIVSLVKSDQICIGYHANNSTEQVDTIMEKNVTVTHAQDILEKTHNGKLCNLDGVKPLIL
RDCSVAGWLLGNPMCDEFLNVPEWSYIVEKINPANDLCYPGNFNDYEELKHLLSRINHFEKIQIIPKNSWSD
HEASGVSSACPYQGRSSFFRNVVWLTKKDNAYPTIKRSYNNTNQEDLLVLWGIHHPNDAAEQTRLYQNPTT
YISVGTSTLNQRLIPKIATRSKVNGQSGRMEFFWTILKSNDAINFESNGNFIAPENAYKIVKKGDSTIMKSE
LEYGNCNTKCQTPIGAINSSMPFHNIHPLTIGECPKYVKSNRLVLATGLRNSPQGERRRKKRGLFG
AIAGFIEGGWQGMVDGWYGYHHSNEQGSGYAADKESTQKAIDGVTNKVNSIIDKMNTQFEAVGREFNNLERR
IENLNKKMEDGFLDVWTYNAELLVLMENERTLDFHDSNVKNLYDKVRLQLRDNAKELGNGCFEFYHRCDNEC
MESVRNGTYDYPQYSEEARLKREEISGVKLESIGTYQILSIYSTVASSLALAIMVAGLFLWMCSNGSLQCRI
>ADD21355/1565 Avian Egypt 2009
(SEQ ID NO. 167)
MEKIVLLLAIVSLVKSDQICIGYHANNSTEQVDTIMEKNVTVTHAQDILEKTHNGKLCNLDGVKPLIL
RDCSVAGWLLGNPMCDEFLNVPEWSYIVEKINPANDLCYPGNFNDYEELKHLLSRINHFEKIQIIPKNSWSD
HEASGVSSACPYQGRSSFFRNVVWLTKKDNAYPTIKRSYNNTNQEDLLVLWGIHHPNDAAEQTRLYQNPTT
YISVGTSTLNQRLVPKIATRSKVNGQSGRMEFFWTILKSNDAINFESNGNFIAPENAYKIVKKGDSTIMKSE
LEYGNCNTKCQTPIGAINSSMPFHNIHPLTIGECPKYVKSNRLVLATGLRNSPQRERRRKKRGLFG
AIAGFIEGGWQGMVDGWYGYHHSNEQGSGYAADKESTQKAIDGVTNKVNSIIDKMNTQFEAVGREFNNLERR
IENLNKKMEDGFLDVWTYNAELLVLMENERTLDFHDSNVKNLYDKVRLQLRDNAKELGNGCFEFYHRCDNEC
MESVRNGTYDYPQYSEEARLKREEISGVKLESIGTYQILSIYSTVASSLALAIMVAGLFLWMCSNGSLQCRI
>ADD21361/1565 Avian Egypt 2009
(SEQ ID NO. 168)
MEKIVLLLAIVSLVKSDQICIGYHANNSTEQVDTIMEKNVTVTHAQDILEKTHNGKLCNLDGVKPLIL
RDCSVAGWLLGNPMCDEFLNVPEWSYIVEKINPANDLCYPGNFNDYEELKHLLSRINHFEKIQIIPKNSWSD
HEASGVSSACPYQGRSSFFRNVVWLTKKDNAYPTIKRSYNNTNQEDLLVLWGIHHPNDAAEQTRLYQNPTT
YISVGTSTXNQRLIPKIATRSKVNGQSGRMEFFWTILKSNDAINFESNGNFIAPENAYKIVKKGDSTIMKSE
LEYGNCNTKCQTPIGAINSSMPFHNIHPLTIGECPKYVKSNRLVLATGLRNSPQGERRRKKRGLFG
AIAGFIEGGWQGMVDGWYGYHHSNEQGSGYAADKESTQKAIDGVTNKVNSIIDKMNTQFEAVGREFNNLERR
IENLNKKMEDGFLDVWTYNAELLVLMENERTLDFHDSNVKNLYDKVRLQLRDNAKELGNGCFEFYHRCDNEC
MESVRNGTYDYPQYSEEARLKREEISGVKLESIGTYQILSIYSTVASSLALAIMVAGLFLWMCSNGSLQCRI
>ADD21376/1559 Avian Egypt 2009
(SEQ ID NO. 169)
LLAIVSLVKSDQICIGYHANNSTEQVDTIMEKNVTVTHAQDILEKTHNGKLCNLDGVKPLIL
RDCSVAGWLLGNPMCDEFLNVPEWSYIVEKINPVNDLCYPGNFNDYEELKHLLSRINHFEKIQIIPKNSWSD
HEASGVSSACPYQGRSSFFRNVVWLTKKDNAYPTIKRSYNNTNQEDLLVLWGIHHPNDAAEQTRLYQNPTT
YISVGTSTLNQRLVPKIATRSKVNGQSGRMEFFWTILRSNDAINFESNGNFIAPENAYKIVKKGDSTIMKSE
LEYGNCNTKCQTPIGAINSSMPFHNIHPLTIGECPKYVKSNRLVLATGLRNSPQGERRRKKRGLFG
AIAGFIEGGWQGMVDGWYGYHHSNEQGSGYAADKESTQKAIDGVTNKVNSIIDKMNTQFEAVGREFNNLERR
IENLNKKMEDGFLDVWTYNAELLVLMENERTLDFHDSNVKNLYDKVRLQLRDNAKELGNGCFEFYHRCDNEC
MESVRNGTYDYPQYSEEARLKREEISGVKLESIGTYQILSIYSTVASSLALAIMVAGLFLWMCSNGSLQCRI
>ADD21379/1565 Avian Egypt 2009
(SEQ ID NO. 170)
MEKIVLLLAIVSLVKSDQICIGYHANNSTEQVDTIMEKNVTVTHAQDILEKTHNGKLCNLDGVKPLIL
RDCSVAGWLLGNPMCDEFLNVPEWSYIVEKINPANDLCYPGNFNDYEELKHLLSRINHFEKIQIIPKNSWSD
HEASGVSSACPYQGRSSFFRNVVWLTKKDDAYPTIKRSYNNTNQEDLLVLWGIHHPNDAAEQTRLYQNPTT
YISVGTSTLNQRLVPKIATRSKVNGQSGRMEFFWTILKSNDAINFESNGNFIAPENAYKIVKKGDSTIMKSE
LEYGNCNTKCQTPIGAINSSMPFHNIHPLTIGECPKYVKSNRLVLATGLRNSPQGERRRKKRGLFG
AIAGFIEGGWQGMVDGWYGYHHSNEQGSGYAADKESTQKAIDGVTNKVNSIIDKMNTQFEAVGREFNNLERR
IENLNKKMEDGFLDVWTYNAELLVLMENERTLDFHDSNVKNLYDKVRLQLRDNAKELGNGCFEFYHRCDNEC
MESVRNGTYDYPQYSEEARLKREEISGVKLESIGTYQILSIYSTVASSLALAIMVAGLFLWMCSNGSLQCRI
>ADD21380/1565 Avian Egypt 2009
(SEQ ID NO. 171)
MEKIVLLLAIVSLVKSDQICIGYHANNSTEQVDTIMEKNVTVTHAQDILEKTHNGKLCNLDGVKPLIL
RDCSVAGWLLGNPMCDEFLNVPEWSYIVEKINPANDLCYPGNFNDYEELKHLLSRINHFEKIQIIPKNSWSD
HEASGVSSACPYQGRSSFFRNVVWITKKDNAYPTIRRSYNNTNQEDLLVLWGIHHPNDAAEQTRLYQNPTT
YISVGTSTLNQRLIPKIATRSKVNGQSGRMEFFWTILKSNDAINFESNGNFIAPENAYKIVKKGDSTIMKSE
LEYGNCNTKCQTPIGAINSSMPFHNIHPLTIGECPKYVKSNRLVLATGLRNSPQGERRRKKRGLFG
AIAGFIEGGWQGMVDGWYGYHHSNEQGSGYAADKESTQKAIDGVTNKVNSIIDKMNTQFEAVGREFNNLERR
IENLNKKMEDGFLDVWTYNAELLVLMENERTLDFHDSNVKNLYDKVRLQLRDNAKELGNGCFEFYHRCDNEC
MESVRNGTYDYPQYSEEARLKREEISGVKLESIGTYQILSIYSTVASSLALAIMVAGLFLWMCSNGSLQCRI
>ADD21371/1565 Avian Egypt 2009
(SEQ ID NO. 172)
MEKIVLLLAIVSLVKSDQICIGYHANNSTEQVDTIMEKNVTVTHAQDILEKTHNGKLCNLDGVKPLIL
RDCSVAGWLLGNPMCDEFLNVPEWSYIVEKINPANDLCYPGNFNDYEELKHLLSRINHFEKIQIIPKNSWSD
HEASGVSSACPYQGISSFFRNVVWLTKKDNAYPTIKRSYNNTNQEDLLVLWGIHHPNDAAEQTRLYQNPTT
YISVGTSTLNQRLVPKIATRSKVNGQSGRMEFFWTILKSNDAINFESNGNFIAPENAYKIVKKGDSTIMKSE
LEYSNCNTKCQTPIGAINSSMPFHNIHPITIGECPKYVKSNRLVLATGLRNSPQGERRRKKRGLFG
AIAGFIEGGWQGMVDGWYGYHHSNEQGSGYAADKESTQKAIDGVTNKVNSIIDKMNTQFEAVGREFNNLERR
IENLNKKMEDGFLDVWTYNAELLVLMENERTLDFHDSNVKNLYDKVRLQLRDNAKELGNGCFEFYHRCDNEC
MESVRNGTYDYPQYSEEARLKREEISGVKLESIGTYQILSIYSTVASSLALAIMVAGLFLWMCSNGSLQCRI
>ADD21377/1553 Avian Egypt 2009
(SEQ ID NO. 173)
LVKSDQICVGYHANNSTEQVDTIMEKNVTVTHAQDILEKTHNGKLCNLDGVKPLIL
RDCSVAGWLLGNPMCDEFLNVPEWSYIVEKINPANDLCYPGNFNDYEELKHLLSRINHFEKIQIIPKNSWSD
HEASGVSSACPYQGRSSFFRNVVWLTKKDNAYPTIKRSYNNTNQEDLLVLWGIHHPNDAAEQTRLYQNPTT
YISVGTSTLNQRLVPKIATRSKVNGQSGRMEFFWTILKSNDAINFESNGNFIAPENAYKIVKKGDSTIMKSE
LEYGNCNTKCQTPIGAINSSMPFHNIHPLTIGECPKYVKSNRLVLVTGLRNSPQGERRRKKRGLFG
AIAGFIEGGWQGMVDGWYGYHHSNEQGSGYAADKESTQKAIDGVTNKVNSIIDKMNTQFEAVGREFNNLERR
IENLNKKMEDGFLDVWTYNAELLVLMENERTLDFHDSNVKNLYDKVRLQLRDNAKELGNGCFEFYHRCDNEC
MESVRNGTYDYPQYSEEARLKREEISGVKLESIGTYQILSIYSTVASSLALAIMVAGLFLWMCSNGSLQCRI
>ADY16730 Avian Egypt 2009
(SEQ ID NO. 174)
MEKIVLLLAIVSLVKSDQICIGYHANNSTEQVDTIMEKNVTVTHAQDILEKTHNGKLCNLDGVKPLIL
RDCSVAGWLLGNPMCDEFLNVPEWSYIVEKINPANDLCYPGNFNDYEELKHLLSRINHFEKIQIIPKNSWSD
HEASGVSSACPYQGRSSFFRNVVWLTKKDNAYPTIKRSYNNTNQEDLLVLWGIHHPNDATEQTRLYQNPTT
YISVGTSTLNQRLVPKIATRSKVNGQSGRMEFFWTILKSNDAINFESNGNFIAPENAYKIVKKGDSTIMKSE
LEYGNCNTKCQTPIGAINSSMPFHNIHPLTIGECPKYVKSNRLVLATGLRNSPQGERRRKKRGLFG
AIAGFIEGGWQGMVDGWYGYHHSNEQGSGYAADKESTQKAIDGVTNKVNSIIDKMNTQFEAVGREFNNLERR
IENLNKKMEDGFLDVWTYNAELLVLMENERTLDFHDSNVKNLYDKVRLQLRDNAKELGNGCFEFYHRCDNEC
MESVRNGTYDYPQYSEEARLKREEISGVKLESIGTYQILSIYSTVASSLALAIMVAGLFLWMCSNGSLQCRI
CI
>ADY16731 Avian Egypt 2009
(SEQ ID NO. 175)
MEKIVLLLAIVSLVKSDQICIGYHANNSTEQVDTIMEKNVTVTHAQDILEKTHNGKLCNLDGVKPLIL
RDCSVAGWLLGNPMCDEFLNVPEWSYIVEKINPANDLCYPGNFNDYEELKHLLSRINHFEKIQIIPKNSWSD
HEASGVSSACPYQGRSSFFRNVVWLTKKDNAYPTIKRSYNNTNQEDLLVLWGIHHPNDATEQTRLYQNPTT
YISVGTSTLNQRLVPKIATRSKVNGQSGRMEFFWTILKSNDAINFESNGNFIAPENAYKIVKKGDSTIMKSE
LEYGNCNTKCQTPIGAINSSMPFHNIHPLTIGECPKYVKSNRLVLATGLRNSPQGERRRKKRGLFG
AIAGFIEGGWQGMVDGWYGYHHSNEQGSGYAADKESTQKAIDGVTNKVNSIIDKMNTQFEAVGREFNNLERR
IENLNKKMEDGFLDVWTYNAELLVLMENERTLDFHDSNVKNLYDKVRLQLRDNAKELGNGCFEFYHRCDNEC
MESVRNGTYDYPQYSEEARLKREEISGVKLESIGTYQILSIYSTVTSSLALAIMVAGLFLWMCSNGSLQCRI
CI
>ACX31975 Avian Egypt 2009
(SEQ ID NO. 176)
MEKIVLLLAIVSLVKSDQICIGYHANNSTEQVDTIMEKNVTVTHAQDILEKTHNGKLCNLDGVKPLIL
RDCSVAGWLLGNPMCDEFLNVPEWSYIVEKINPANDLCYPGNFNDYEELKHLLSRINHFEKIQIIPKNSWSD
HEASGVSSACPYQGRSSFFRNVVWLTKKDNAYPTIKRSYNNTNQEDLLVLWGIHHPNDAAEQTRLYQNPTT
YISVGTSTLNQRLVPKIATRSKVNGQSGRMEFFWTILKSNDAINFESNGNFIAPENAYKIVKKGDSTIMKSE
LEYGNCNTKCQTPIGAINSSMPFHNIHPLTIGECPKYVKSNRLVLATGLRNSPQGERRRKKRGLFG
AIAGFIEGGWQGMVDGWYGYHHSNEQGSGYAADKESTQKAIDGVTNKVNSIIDKMNTQFEAVGREFNNLERR
IENLNKKMEDGFLDVWTYNAELLVLMENERTLDFHDSNVKNLYDKVRLQLRDNAKELGNGCFEFYHRCDNEC
MESVRNGTYDYPQYSEEARLKREEISGVKLESIGTYQILSIYSTVASSLALAIMVAGIFLWMCSNGSLQCRI
CI
>ACX31997/1553 Avian Egypt 2009
(SEQ ID NO. 177)
KSDQICIGYHANNSTEQVDTIMEKNVTVTHAQDILEKTHNGKLCNLDGVKPLIL
RDCSVAGWLLGNPMCDEFLNVPEWSYIVEKINPANDLCYPGNFNDYEELKHLLSRINHFEKIQIIPKNYWSD
HEASGVSSACPYQGRSSFFRNVVWLTKKNNAYPTIKRSYNNTNQEDLLVLWGIHHPNDAEEQTRLYQNPTT
YISVGTSTLNQRLVPKIATRSKVNGQSGRMEFFWTILKSNDAINFESNGNFIAPENAYKIVKKGDSTIMKSE
LEYGNCNTKCQTPIGAINSSMPFHNIHPLTIGECPKYVKSNRLVLATGLRNSPQGERRRKKRGLFG
AIAGFIEGGWQGMVDGWYGYHHSNEQGSGYAADKESTQKAIDGVTNKVNSIIDKMNTQFEAVGREFNALERR
IENLNKKMEDGFLDVWTYNAELLVLMENERTLDFHDSNVKNLYDKVRLQLRDNAKELGNGCFEFYHRCDNEC
MESVRNGTYDYPQYSEEARLKREEISGVKLESIGTYQILSIYSTVASSLALAIMVAGLFLWMCSNGSLQCRI
CI
>ADD21359/1565 Avian Egypt 2009
(SEQ ID NO. 178)
MEKIVLLLAIVSLVKSDQICIGYHANNSTEQVDTIMEKNVTVTHAQDILEKTHNGKLCNLDGVKPLIL
RDCSVAGWLLGNPMCDEFLNVPEWSYIVEKINPANDLCYPGNFNDYEELKHLLSRINHFEKIQIIPKNSWSD
HEASGVSSACPYQGRSSFFRNVVWLTKKNNAYPTIKRSYNNTNQEDLLVLWGIHHPNDAAEQTRLYQNPTT
YISVGTSTLNQRLIPKIATRSKVNGQSGRMEFFWTILKSNDAINFESNGNFIAPENAYKIVKKGDSTIMKSE
LEYGNCNTKCQTPIGAINSSMPFHNIHPLTIGECPKYVKSNRLVLATGLRNSPQGERRRKKRGLFG
AIAGFIEGGWQGMVDGWYGYHHSNEQGSGYAADKESTQKAIDGVTNKVNSIIDKMNTQFEAVGREFNNLERR
IENLNKKMEDGFLDVWTYNAELLVLMENERTLDFHDSNVKNLYDKVRLQLRDNAKELGNGCFEFYHRCDNEC
MESVRNGTYDYPQYSEEARLKREEISGVRLESIGTYQILSIYSTVASSLALAIMVAGLFLWMCSNGSLQCRI
>ADD21382/1565 Avian Egypt 2009
(SEQ ID NO. 179)
MEKIVLLLAIVSLVKSDQICIGYHANNSTEQVDTIMEKNVTVTHAQDILEKTHNGKLCNLDGVKPLIL
RDCSVAGWLLGNPMCDEFLNVPEWSYIVEKINPANDLCYPGNFNDYEELKHLLSRINHFEKIQIIPKNSWSD
HEASGVSSACPYQGRSSFFRNVVWLTKKDNAYPTIKRSYNNTNQEDLLVLWGIHHPNDATEQTRLYQNPTT
YISVGTSTLNQRLIPKIATRSKVNGQSGRMEFFWTILKSNDAINFESNGNFIAPENAYKIVKKGDSTIMKSE
LEYGNCNTKCQTPIGAINSSMPFHNIHPLTIGECPKYVKSNRLVLATGLRNSPQEERRRKKRGLFG
AIAGFIEGGWQGMVDGWYGYHHSNEQGSGYAADKESTQKAIDGVTNKVNSIIDKMNTQFEAVGREFNNLERR
IENLNKKMEDGFLDVWTYNAELLVLMENERTLDFHDSNVKNLYDKVRLQLRDNAKELGNGCFEFYHRCDNEC
MESVRNGTYDYPQYSEEARLKREEISGVKLESIGTYQILSIYSTVASSLALAIMVAGLFLWMCSNGSLQCRI
>ADB77952/1561 Avian Egypt 2009
(SEQ ID NO. 180)
LLAIVSLVKSDQICIGYHANNSTEQVDTIMEKNVTVTHAQDILEKTHNGKLCNLDGVKPLIL
RDCSVAGWLLGNPMCDEFLNVPEWSYIVEKINPANDLCYPGNFNDYEELKHLLSRINHFEKIQIIPKNSWSD
HEASGVSSACPYQGRSSFFRNVVWLTKKDNAYPTIKRSYNNTNQEDLLVLWGIHHPNDAAEQTRLYQNPTT
YISVGTSTLNQRLVPKIATRSKVNGQSGRMEFFWTILKSNDAINFESNGNFIAPENAYKIVKKGDSTIMKSE
LEYGNCNTKCQTPIGAINSSMPFHNIHPLTIGECPKYVKSNRLVLATGLRNGPQGERRRKKRGLFG
AIAGFIEGGWQGMVDGWYGYHHSNEQGSGYAADKESTQKAIDGVTNKVNSIIDKMNTQFEAVGREFNNLERR
IENLNKKMEDGFLDVWTYNAELLVLMENERTLDFHDSNVKNLYDKVRLQLRDNAKELGNGCFEFYHRCDNEC
MESVRNGTYDYPQYSEEARLKREEISGVKLESIGTYQILSIYSTVASSLALAIMVAGLFLWMCSNGSLQCRI
CI
>ADB85109 Avian Egypt 2009
(SEQ ID NO. 181)
MEKMVLLLAIVSLVKSDQICIGYHANNSTEQVDTIMEKNVTVTHAQDILEKTHNGKLCNLDGVKPLIL
RDCSVAGWLLGNPMCDEFLNVPEWSYIVEKINPANDLCYPGNFNDYEELKHLLSRINHFEKIQIIPKNSWSD
HEASGVSSACPYQGRSSFFRNVVWLTKKDNAYPTIKRSYNNTNQEDLLVLWGIHHPNDAAEQTRLYQNPTT
YISVGTSTLNQRLVPKIATRSKVNGQSGRMEFFWTILKSNDAINFESNGNFIAPENAYKIVKKGDSTIMKSE
LEYGNCNTKCQTPIGAINSSMPFHNIHPLTIGECPKYVKSNRLVLATGLRNGPQGERRRKKRGLFG
AIAGFIEGGWQGMVDGWYGYHHSNEQGSGYAADKESTQKAIDGVTNKVNSIIDKMNTQFEAVGREFNNLERR
IENLNKKMEDGFLDVWTYNAELLVLMENERTLDFHDSNVKNLYDKVRLQLRDNAKELGNGCFEFYHRCDNEC
MESVRNGTYDYPQYSEEARLKREEISGVKLESIGTYQILSIYSTVASSLALAIMVAGLFLWMCSNGSLQCRI
CI
>ADM85844 Avian Egypt 2009
(SEQ ID NO. 182)
MEKIVLLLAIVSLVKSDQICIGYHANNSTEQVDTIMEKNVTVTHAQDILEKTHNGKLCNLDGVKPLIL
RDCSVAGWLLGNPMCDEFLNVPEWSYIVEKINPANDLCYPGNFNDYEELKHLLSRINHFEKIQIIPKNSWSD
HEASGVSSACPYQGRSSFFRNVVWLTKKNSAYPTIKKSYNNTNQEDLLVLWGIHHPNDAEEQTRLYQNPTT
YISVGTSTLNQRLVPKIATRSKVNGQSGRMEFFWTILKSNDAINFESNGNFIAPENAYKIVKKGDSTIMKSE
LEYGNCNTKCQTPIGAINSSMPFHNIHPLTIGECPKYVKSNRLVLATGLRNSPQGERRRKKRGLFG
AIAGFIEGGWQGMVDGWYGYHHSNEQGSGYAADKESTQKAIDGVTNKVNSIIDKMNTQFEAVGREFNALERR
IENLNKKMEDGFLDVWTYNAELLVLMENERTLDFHDSNVKNLYDKVRLQLRDNAKELGNGCFEFYHRCDNEC
MESVRNGTYDYPQYSEEARLKREEISGVKLESIGTYQILSIYSTVASSLALAIMVAGLSLWMCSNGSLQCRI
CI
>ADM85845 Avian Egypt 2009
(SEQ ID NO. 183)
MEKIVLLLAIVSIVKSDQICIGYHANNSTEQVDTIMEKNVTVTHAQDILEKTHNGKLCNLNGVKPLIL
RDCSVAGWLLGNPMCDEFLNVPEWSYIVEKINPANDLCYPGNFNDYEELKHLLSRINHFEKIQIIPKNSWSD
HEASGVSSACPYQGRSSFFRNVVWLTKKNNAYPTIKKSYNNTNQEDLLVLWGIHHPNDAAEQTKLYQNPTT
YISVGTSTLNQRLVPKIATRSKVNGQSGRMEFFWTILKSNDAINFESNGNFIAPENAYKIVKKGDSTIMKSE
LEYGNCNTKCQTPIGAINSSMPFHNIHPLTIGECPKYVKSNRLVLATGLRNSPQGERRRKKRGLFG
AIAGFIEGGWQGMVDGWYGYHHSNEQGSGYAADKESTQKAIDGVTNKVNSIIDKMNTQFEAVGREFNNLERR
IENLNKKMEDGFLDVWTYNAELLVLMENERTLDFHDSNVKNLYDKVRLQLRDNAKELGNGCFEFYHRCDNEC
MESVRNGTYDYPQYSEEARLKREEISGVKLESIGTYQILSIYSTVASSLALAIMVAGLFLWMCSNGSLQCRI
CI
>ADM85847 Avian Egypt 2010
(SEQ ID NO. 184)
MEKIVLLLAIVSLVKSDQICIGYHANNSTEQVDTIMEKNVTVTHAQDILEKTHNGKLCNLDGVKPLIL
RDCSVAGWLLGNPMCDEFLNVPEWSYIVEKINPANDLCYPGNFNDYEELKHLLSRINHFEKIQIIPKNSWSD
HEASGVSSACPYQGRSSFFRNVVWLTKKDNAYPTIKRSYNNTNQEDLLVLWGIHHPNDATEQTRLYQNPTT
YISVGTSTLNQRLVPKIATRSKVNGQSGRMEFFWTILKSNDAINFDSNGNFIAPENAYKIVKKGDSTIMKSE
LEYGNCNTKCQTPIGAINSSMPFHNIHPLTIGECPKYVKSNRLVLATGLRNSPQGERRRKKRGLFG
AIAGFIEGGWQGMVDGWYGYHHSNEQGSGYAADKESTQKAIDGVTNKVNSIIDKMNTQFEAVGREFNNLERR
IENLNKKMEDGFLDVWTYNAELLVLMENERTLDFHDSNVKNLYDKVRLQLRDNAKELGNGCFEFYHRCDNEC
MESVRNGTYDYPQYSEEARLKREEISGVKLESIGTYQILSIYSTVASSLALAIMVAGLFLWMCSNGSLQCRI
CI
>ADM85852 Avian Egypt 2010
(SEQ ID NO. 185)
MEKIVLLLAIVSIVKSDQICIGYHANNSTEQVDTIMEKNVTVTHAQDILEKTHNGKLCNLDGVKPLIL
RDCSVAGWLLGNPMCDEFLNVPEWSYIVEKINPANDLCYPGNFNDYEELKHLLSRINHFEKIQIIPKNSWSD
HEASGVSSACPYQGRSSFFRNVVWLTKKNNAYPTIKKSYNNTNQEDLLVLWGIHHPNDAAEQTRLYQNPTT
YISVGTSTLNQRLVPKIATRPKVNGQSGRMEFFWTILKSNDAINFESNGNFIAPENAYKIVKKGDSTIMKSE
LEYGNCNTKCQTPIGAINSSMPFHNIHPLTIGECPKYVKSNRLVLATGLRNSPQGERRRKKRGLFG
AIAGFIEGGWQGMVDGWYGYHHSNEQGSGYAADKESTQKAIDGVTNKVNSIIDKMNTQFEAVGREFNNLERR
IENLNKKMEDGFLDVWTYNAELLVLMENERTLDFHDSNVKNLYDKVRLQLRDNAKELGNGCFEFYHRCDNEC
MESVRNGTYDYPQYSEEARLKREEISGVKLESIGTYQILSIYSTVASSLALAIMVAGLFLWMCSNGSLQCRI
CI
>ADM85854 Avian Egypt 2010
(SEQ ID NO. 186)
MEKIVLLLAIVSIVKSDQICIGYHANNSTEQVDTIMEKNVTVTHAQDILEKTHNGKLCNLDGVKPLIL
RDCSVAGWLLGNPMCDEFLNVPEWSYIVEKINPANDLCYPGNFNDYEELKHLLSRINHFEKIQIIPKNSWSD
HEASGVSSACPYQGRSSFFRNVVWLTKKNNAYPTIKKSYNNTNQEDLLVLWGIHHPNDAAEQTRLYQNPTT
YISVGTSTLNQRLVPKIANRSKVNGQSGRMEFFWTILKSNDAINFESNGNFIAPENAYKIVKKGDSTIMKSE
LEYGNCNTKCQTPIGAINSSMPFHNIHPLTIGECPKYVKSNRLVLATGLRNSPQGERRRKKRGLFG
AIAGFIEGGWQGMVDGWYGYHHSNEQGSGYAADKESTQKAIDGVTNKVNSIIDKMNTQFEAVGREFNNLERR
IENLNKKMEDGFLDVWTYNAELLVLMENERTLDFHDSNVKNLYDKVRLQLRDNAKELGNGCFEFYHRCDNEC
MESVRNGTYDYPQYSEEARLKREEISGVKLESIGTYQILSIYSTVASSLALAIMVAGLFLWMCSNGSLQCRI
CI
>ADM85855 Avian Egypt 2010
(SEQ ID NO. 187)
MEKIVLLLAIVSIVKSDQICIGYHANNSTEQVDTIMEKNVTVTHAQDILEKTHNGKLCNLDGVKPLIL
RDCSVAGWLLGNPMCDEFLNVPEWSYIVEKINPANDLCYPGNFNDYEELKHLLSRINHFEKIQIIPKNSWSD
HEASGVSSACPYQGRSSFFRNVVWLTKKDNAYPTIKRSYNNTNQEDLLVLWGIHHPNDAAEQTRLYQNPTT
YISVGTSTLNQRLVPKIATRSKVNGQSGRMEFFWTILKSNDAINFESNGNFIAPENAYKIVKKGDSTIMKSE
LEYGNCNTKCQTPIGAINSSMPFHNIHPLTIGECPKYVKSNRLVLATGLRNSPQGERRRKKRGLFG
AIAGFIEGGWQGMVDGWYGYHHSNEQGSGYAADKESTQKAIDGVTNKVNSIIDKMNTQFEAVGREFNNLERR
IENLNKKMEDGFLDVWTYNAELLVLMENERTLDFHDSNVKNLYDKVRLQLRDNAKELGNGCFEFYHRCDNEC
MESVRNGTYDYPQYSEEARLKREEISGVKLESIGTYQILSIYSTVASSLALAIMVAGLFLWMCSNGSLQCRI
CI
>ADM85856/1557 Avian Egypt 2010
(SEQ ID NO. 188)
VSLVKSDQICIGYHANNSTEQVDTIMEKNVTVTHAQDILEKTHNGKLCNLDGVKPLIL
RDCSVAGWLLGNPMCDEFLNVPEWSYIVEKINPANDLCYPGNFNDYEELKHLLSRINHFEKIQIIPKNSWSD
HEASGVSSACPYQGRSSFFRNVVWLTKKDNAYPTIKRSYNNTNQEDLLVLWGIHHPNDATEQTRLYQNPTT
YISVGTSTLNQRLVPKIATRSKVNGQSGRMEFFWTILKSNDAINFESNGNFIAPENAYKIVKKGDSTIMKSE
LEYGNCNTKCQTPIGAINSSMPFHNIHPLTIGECPKYVKSNRLVLATGLRNSPQGDRRRKKRGLFG
AIAGFIEGGWQGMVDGWYGYHHSNEQGSGYAADKESTQKAIDGVTNKVNSIIDKMNTQFEAVGREFNNLERR
IENLNKKMEDGFLDVWTYNAELLVLMENERTLDFHDSNVKNLYDKVRLQLRDNAKELGNGCFEFYHRCDNEC
MESVRNGTYDYPQYSEEARLKREEISGVKLESIGTYQILSIYSTVASSLALAIMVAGLFLWMCSNGSLQCRI
CI
>ADM85861 Avian Egypt 2010
(SEQ ID NO. 189)
MEKIVLLLAIFSLVKSDQICIGYHANNSTEQVDTIMEKNVTVTHAQDILEKTHNGKLCNLDGVKPLIL
RDCSVAGWLLGNPMCDEFLNVPEWSYIVEKINPANDLCYPGNFNDYEELKHLLSRINHFEKIQIIPKNSWSD
HEASGVSSACPYQGRSSFFRNVVWLTKKDNAYPTIKRSYNNTNQEDLLVLWGIHHPNDAAEQTRLYQNPTT
YISVGTSTLNQRLVPKIATRSKVNGQSGRMEFFWTILKSNDAINFESNGNFIAPENAYKIVKKGDSTIMKSE
LEYGNCNTKCQTPIGAINSSMPFHNIHPLTIGECPKYVKSNRLVLATGLRNSPQGERRRKKRGLFG
AIAGFIEGGWQGMVDGWYGYHHSNEQGSGYAADKESTQKAIDGVTNKVNSIIDKMNTQFEAVGREFNNLERR
IENLNKKMEDGFLDVWTYNAELLVLMENERTLDFHDSNVKNLYDKVRLQLRDNAKELGNGCFEFYHRCDNEC
MESVRNGTYDYPQYSEEARLKREEISGVKLESIGTYQILSIYSTVASSLALAIMVAGLFLWMCSNGSLQCRI
CI
>ADM85862 Avian Egypt 2010
(SEQ ID NO. 190)
MEKIVLLLAIVSIVKSDQICIGYHANNSTEQVDTIMEKNVTVTHAQDILEKTHNGKLCNLDGVKPLIL
RDCSVAGWLLGNPMCDEFLNVPEWSYIVEKINPTNDLCYPGNFNDYEELKHLLSRINHFEKIQIIPKNSWSD
HEASGVSSACPYQGRSSFFRNVVWLTKKNNAYPTIKKSYNNTNQEDLLVLWGIHHPNDAAEQTRLYQNPTT
YISVGTSTLNQRLVPKIATRSKVNGQSGRMEFFWTILKSNDAINFESNGNFIAPENAYKIVKKGDSTIMKSE
LEYGNCNTKCQTPIGAINSSMPFHNIHPLTIGECPKYVKSNRLVLATGLRNSPQGERRRKKRGLFG
AIAGFIEGGWQGMVDGWYGYHHSNEQGSGYAADKESTQKAIDGVTNKVNSIIDKMNTQFEAVGREFNNLERR
IENLNKKMEDGFLDVWTYNAELLVLMENERTLDFHDSNVKNLYDKVRLQLRDNAKELGNGCFEFYHRCDNEC
MESVRNGTYDYPQYSEEARLKREEISGVKLESIGTYQILSIYSTVASSLALAIMVAGLFLWMCSNGSLQCRI
CI
>ADM85863 Avian Egypt 2010
(SEQ ID NO. 191)
MEKIVLLLAIVSLVKSDQICIGYHANNSTEQVDTIMEKNVTVTHAQDILEKTHNGKLCNLDGVKPLIL
RDCSVAGWLLGNPMCDEFLNVPEWSYIVEKINPANDLCYPGNFNDYEELKHLLSRINHFEKIQIIPKNSWSD
HEASGVSSACPYQGRSSFFRNVVWLTKKDNAYPTIKRSYNNTNQEDLLVLWGIHHPNDATEQTRLYQNPTT
YISVGTSTLNQRLVPKIATRSKVNGQSGRMEFFWTILKSNDAINFESNGNFIAPENAYKIVKKGDSTIMKSE
LEYGNCNTKCQTPIGAINSSMPFHNIHPLTIGECPKYVKSNRLVLATGLRNSPQGDRRRKKRGLFG
AIAGFIEGGWQGMVDGWYGYHHSNEQGSGYAADKESTQKAIDGVTNKVNSIIDKMNTQFEAVGREFNNLERR
IENLNKKMEDGFLDVWTYNAELLVLMENERTLDFHDSNVKNLYDKVRLQLRDNAKELGNGCFEFYHRCDNEC
MESVRNGTYDYPQYSEEARLKREEISGVKLESIGTYQILSIYSTVASSLALAIMVAGLFLWMCSNGSLQCRI
CI
>ADM85868 Avian Egypt 2010
(SEQ ID NO. 192)
MEKIVLLLAIVSLVKSDQICIGYHANNSTEQVDTIMEKNVTVTHAQDILEKTHNGKLCNLDGVKPLIL
RDCSVAGWLLGNPMCDEFLNVPEWSYIVEKINPANDLCYPGNFNDYEELKHLLSRINHFEKIQIIPKNSWSD
HGASGVSSACPYQGRSSFFRNVVWLTKKDNAYPTIKKSYNNTNQEDLLILWGIHHPNDAAEQTRLYQNPTT
YISVGTSTLNQRLVPKIATRSKVNGQSGRMEFFWTILKPNDAINFESNGNFIAPENAYKIVKKGDSTIMKSE
LEYGNCNTKCQTPIGAINSSMPFHNIHPLTIGECPKYVKSNRLVLATGLRNSPQGERRRKKRGLFG
AIAGFIEGGWQGMVDGWYGYHHSNEQGSGYAADKESTQKAIDGVTNKVNSIIDKMNTQFEAVGREFNNLERR
IENLNKKMEDGFLDVWTYNAELLVLMENERTLDFHDSNVKNLYDKVRLQLRDNAKELGNGCFEFYHRCDNEC
MESVRNGTYDYPQYSEEARLKREEISGVKLESIGTYQILSIYSTVASSLALAIMVAGLFLWMCSNGSLQCRI
CI
>ADM85870 Avian Egypt 2010
(SEQ ID NO. 193)
MEKIVLLLAIVSIVKSDQICIGYHANNSTEQVDTIMEKNVTVTHAQDILEKTHNGKLCNLDGVKPLIL
RDCSVAGWLLGNPMCDEFLNVPEWSYIVEKINPANDLCYPGNFNDYEELKHLLSRINHFEKIQIIPKNSWSD
HEASGVSSACPYQGRSSFFRNVVWLTKKNNAYPTIKKSYNNTNQEDLLVLWGIHHPNDAVEQTRLYQNPTT
YISVGTSTLNQRLVPKIATRSKVNGQSGRMEFFWTILKSNDAINFESNGNFIAPENAYKIVKKGDSTIMKSE
LEYGNCNTKCQTPIGAINSSMPFHNIHPLTIGECPKYVKSNRLVLATGLRNSPQGERRRKKRGLFG
AIAGFIEGGWQGMVDGWYGYHHSNEQGSGYAADKESTQKAIDGVTNKVNSIIDKMNTQFEAVGREFNNLERR
IENLNKKMEDGFLDVWTYNAELLVLMENERTLDFHDSNVKNLYDKVRLQLRDNAKELGNGCFEFYHRCDNEC
MESVRNGTYDYPQYSEEARLKREEISGVKLESIGTYQILSIYSTVASSLVLAIIVAGLFLWMCSNGSLQCRI
CI
>ADM85871 Avian Egypt 2010
(SEQ ID NO. 194)
MEKIVLLLAIFSLVKSDQICIGYHANNSTEQVDTIMEKNVTVTHAQDILEKTHNGKLCNLDGVKPLIL
RDCSVAGWLLGNPMCDEFLNVPEWSYIVEKINPANDLCYPGNFNDYEELKHLLSRINHFEKIQIIPKNSWSD
HEASGVSSACPYQGRSSFFRNVVWLTKKDNAYLTIKRSYNNTNQEDLLVLWGIHHPNDAAEQTRLYQNPTT
YISVGTSTLNQRLVPKIATRSKVNGQSGRMEFFWTILKSNDAINFESNGNFIAPENAYKIVKKGDSTIMKSE
LEYGNCNTKCQTPIGAINSSMPFHNIHPLTIGECPKYVKSNRLVLATGLRNSPQGERRRKKRGLFG
AIAGFIEGGWQGMVDGWYGYHHSNEQGSGYAADKESTQKAIDGVTNKVNSIIDKMNTQFEAVGREFNNLERR
IENLNKKMEDGFLDVWTYNAELLVLMENERTLDFHDSNVKNLYDKVRLQLRDNAKELGNGCFEFYHRCDNEC
MESVRNGTYDYPQYSEEARLKREEISGVKLESIGTYQILSIYSTVASSLALAIMVAGLFLWMCSNGSLQCRI
CI
>ADM85873/1558 Avian Egypt 2010
(SEQ ID NO. 195)
IVSIVKSDQICIGYHANNSTEQVDTIMEKNVTVTHAQDILEKTHNGKLCNLDGVKPLIL
RDCSVAGWLLGNPMCDEFLNVPEWSYIVEKINPANDLCYPGNFNDYEELKHLLSRINHFEKIQIIPKDSWSD
HEASGVSSACPYQGRSSFFRNVVWLTKRNNAYPTIKKSYNNTNQEDLLVLWGIHHPNDAAEQTRLYQNPTT
YISVGTSTLNQRLVPKIATRSKVNGQSGRMEFFWTILKSNDAINFESNGNFIAPENAYKIVKKGDSTIMKSE
LEYGNCNTKCQTPIGAINSSMPFHNIHPLTIGECPKYVKSNRLVLATGLRNSPQGERRRKKRGLFG
AIAGFIEGGWQGMVDGWYGYHHSNEQGSGYAADKESTQKAIDGVTNKVNSIIDKMNTQFEAVGREFNNLERR
IENLNKKMEDGFLDVWTYNAELLVLMENERTLDFHDSNVKNLYDKVRLQLRDNAKELGNGCFEFYHRCDNEC
MESVRNGTYDYPQYSEEARLKREEISGVKLESIGTYQILSIYSTVASSLALAIMVAGLFLWMCSNGSLQCRI
CI
>ADM85874 Avian Egypt 2010
(SEQ ID NO. 196)
MEKIVLLLAIVSIVKSDQICIGYHANNSTEQVDTIMEKNVTVTHAQDILEKTHNGKLCNLDGVKPLIL
RDCSVAGWLLGNPMCDEFLNVPEWSYIVEKINPANDLCYPGNFNDYEELKHLLSRINHFEKIQIIPKDSWSD
HEASGVSSACPYQGRSSFFRNVVWLTKKNNAYPTIKKNYNNTNQEDLLVLWGIHHPNDAAEQTRLYQNPTT
YISVGTSTLNQRLVPKIATRSKVNGQSGRMEFFWTILKSNDAINFESNGNFIAPENAYKIVKKGDSTIMKSE
LEYGNCNTKCQTPIGAINSSMPFHNIHPLTIGECPKYVKSNRLVLATGLRNSPQGERRRKKRGLFG
AIAGFIEGGWQGMVDGWYGYHHSNEQGSGYAADKESTQKAIDGVTNKVNSIIDKMNTQFEAVGREFNNLERR
IENLNKKMEDGFLDVWTYNAELLVLMENERTLDFHDSNVKNLYDKVRLQLRDNAKELGNGCFEFYHRCDNEC
MESVRNGTYDYPQYSEEARLKREEISGVKLESIGTYQILSIYSTVASSLALAIMVAGLFLWMCSNGSLQCRI
CI
>ADM85875 Avian Egypt 2010
(SEQ ID NO. 197)
MEKIVLLLAIVSIVKSDQICIGYHANNSTEQVDTIMEKNVTVTHAQDILEKTHNGKLCNLDGVKPLIL
RDCSVAGWLLGNPMCDEFLNVPEWSYIVEKINPSNDLCYPGNFNDYEELKHLLSRINHFEKIQIIPKNSWSD
HEASGVSSACPYQGRSSFFRNVVWLTKKNNAYPTIKKSYNNTNQEDLLVLWGIHHPNDEAEQTRLYQNPTT
YISVGTSTLNQRLVPKIATRSKVNGQSGRMEFFWTILKSNDAINFESNGNFIVPENAYKIVKKGDSTIMKSE
LEYGSCNTKCQTPIGAINSSMPFHNIHPLTIGECPKYVKSNRLVLATGLRNSPQGERKRKKRGLFG
AIAGFIEGGWQGMVDGWYGYHHSNEQGSGYAADKESTQKAIDGVTNKVNSIIDKMNTQFEAVGREFNNLERR
IENLNKKMEDGFLDVWTYNAELLVLMENERTLDFHDSNVKNLYDKVRLQLRDNAKELGNGCFEFYHRCDNEC
MESVRNGTYDYPQYSEEARLKREEISGVKLESIGTYQILSIYSTVASSLALAIMVAGLFLWMCSNGSLQCRI
CI
>ADM85876 Avian Egypt 2010
(SEQ ID NO. 198)
MEKIVLLLAIISIVKSDQICIGYHANNSTEQVDTIMEKNVTVTHAQDILEKTHNGKLCSLDGVKPLIL
RDCSVAGWLLGNPMCDEFLNVPEWSYIVEKINPANDLCYPGNFNDYEELKHLLSRINHFEKIQIIPKNSWSD
HEASGVSSACPYQGRSSFFRNVVWLTKKNNAYPTIKKSYNNTNQEDLLVLWGIHHPNDAAEQTRLYQNPTT
YISVGTSTLNQRLVPKIATRSKVNGQSGRMEFFWTILKSNDAINFESNGNFIAPENAYKIVKKGDSTIMKSE
LEYGNCNTKCQTPIGAINSSMPFHNIHPLTIGECPKYVKSNRLVLATGLRNSPQGERRRKKRGLFG
AIAGFIEGGWQGMVDGWYGYHHSNEQGSGYAADKESTQKAIDGVTNKVNSIIDKMNTQFEAVGREFNNLERR
IENLNKKMEDGFLDVWTYNAELLVLMENERTLDFHDSNVKNLYDKVRLQLRDNAKELGNGCFEFYHRCDNEC
MESVRNGTYDYPQYSEEARLKREEISGVKLESIGTYQILSIYSTVASSLALAIMVAGLFLWMCSNGSLQCRI
CI
>ADM85878 Avian Egypt 2010
(SEQ ID NO. 199)
MEKIVLLLAIVSIVKSDQICIGYHANNSTEQVDTIMEKNVTVTHAQDILEKTHNGKLCNLDGVKPLIL
RDCSVAGWLLGNPMCDEFLNVPEWSYIVEKINPANDLCYPGNFNDYEELKHLLSRINHFEKIQIIPKNSWSD
HEASGVSSACPYQGRSSFFRNVVWLTKKNNAYPTIKKSYNNTNQEDLLVLWGIHHPNDAAEQTRLYQNPTT
YISVGTSTLNQRLVPKIATRSKVNGQSGRMEFFWTILKSNDAINFESNGNFIAPENAYKIVKKGDSTIMKSE
LEYGNCNTKCQTPIGAINSSMPFHNIHPLTIGECPKYVKSNRLVLATGLRNSPQGERRRKKRGLFG
AIAGFIEGGWQGMVDGWYGYHHSNEQGSGYAADKESTQKAIDGVTNKVNSIIDKMNTQFEAVGREFNNLERR
IENLNKKMEDGFLDVWTYNAELLVLMENERTLDFHDSNVKNLYDKVRLQLRDNAKELGNGCFEFYHRCDNEC
MESVRNGTYDYPQYSEEARLKREEISGVKLESIGTYQILSIYSTVASSLALAIMVAGLFLWMCSNGSLQCRI
CI
>ADM85884 Avian Egypt 2010
(SEQ ID NO. 200)
MEKIVLLLAIVSIVKSDQICIGYHANNSTEQVDTIMEKNVTVTHAQDILEKTHNGKLCNLDGVKPLIL
RDCSVAGWLLGNPMCDEFLNVPEWSYIVEKINPANDLCYPGNFNDYEELKHLLSRINHFEKIQIISKNSWSD
HEASGVSSACPYQGRSSFFRNVVWLTKKNNAYPTIKKSYNNTNQEDLLVLWGIHHPNDAAEQTRLYQNPTT
YISVGTSTLNQRLVPKIATRSKVNGQSGRMEFFWTILKSNDAINFESNGNFIAPENAYKIVKKGDSTIMKSE
LEYGNCNTKCQTPIGAINSSMPFHNIHPLTIGECPKYVKSNRLVLATGLRNSPQGERRRKKRGLFG
AIAGFIEGGWQGMVDGWYGYHHSNEQGSGYAADKESTQKAIDGVTNKVNSIIDKMNTQFEAVGREFNNLERR
IENLNKKMEDGFLDVWTYNAELLVLMENERTLDFHDSNVKNLYDKVRLQLRDNAKELGNGCFEFYHRCDNEC
MESVRNGTYDYPQYSEEARLKREEISGVKLESIGTYQILSIYSTVVSSLALAIMVAGLFLWMCSNGSLQCRI
CI
>ADM85881 Avian Egypt 2010
(SEQ ID NO. 201)
MEKIVLLLAIFSLVKSDQICIGYHANNSTEQVDTIMEKNVTVTHAQDILEKTHNGKLCNLDGVKPLIL
RNCSVAGWLLGNPMCDEFLNVPEWSYIVEKINPANDLCYPGNFNDYEELKHLLSRINHFEKIQIIPKNSWSD
HEASGVSSACPYQGRSSFFRNVVWLTKKDNAYPTIKRSYNNTNQEDLLVLWGIHHPNDAAEQTRLYQNPTT
YISVGTSTLNQRLVPKIATRSKVNGQSGRMEFFWTILKSNDAINFESNGNFIAPENAYKIVKKGDSTIMKSE
LEYGNCNTKCQTPIGAINSSMPFHNIHPLTIGECPKYVKSNRLVLATGLRNSPQGERRRKKRGLFG
AIAGFIEGGWQGMVDGWYGYHHSNEQGSGYAADKESTQKAIDGVTNKVNSIIDKMNTQFEAVGREFNNLERR
IENLNKKMEDGFLDVWTYNAELLVLMENERTLDFHDSNVKNLYDKVRLQLRDNAKELGNGCFEFYHRCDNEC
MESVRNGTYDYPQYSEEARLKREEISGVKLESIGTYQILSIYSTVASSLALAIMVAGLFLWMCSNGSLQCRI
CI
>ADM85883 Avian Egypt 2010
(SEQ ID NO. 202)
MEKIVLLLAIVSIVKSDQICIGYHANNSTEQVDTIMEKNVTVTHAQDILEKTHNGKLCNLNGVKPLIL
RDCSVAGWLLGNPMCDEFLNVPEWSYIVEKINPANDLCYPGNFNDYEELKHLLSRINHFEKIQIIPKNSWSD
HEASGVSSACPYQGRSSFFRNVVWLTKKNNAYPTIKKSYNNTNQEDLLVLWGIHHPNDAAEQTRLYQNPTT
YISVGTSTLNQRLVPKIATRSKVNGQSGRMEFFWTILKSNDAINFESNGNFIAPENAYKIVKKGDSTIMKSE
LEYGNCNTKCQTPIGAINSSMPFHNIHPLTIGECPKYVKSNRLVLATGLRNSPQGERRRKKRGLFG
AIAGFIEGGWQGMVDGWYGYHHSNEQGSGYAADKESTQKAIDGVTNKVNSIIDKMNTQFEAVGREFNNLERR
IENLNKKMEDGFLDVWTYNAELLVLMENERTLDFHDSNVKNLYDKVRLQLRDNAKELGNGCFEFYHRCDNEC
MESVRNGTYDYPQYSEEARLKREEISGVKLESIGTYQILSIYSTVASSLALAIMVAGLFLWMCSNGSLQCRI
CI
>ADQ53454 Avian Israel 2010
(SEQ ID NO. 203)
MEKIVLLLAIVSIVKSDQICIGYHANNSTEQVDTIMEKNVTVTHAQDILEKTHNGKLCNLDGVKPLIL
RDCSVAGWLLGNPMCDEFLNVPEWSYIVEKINPANDLCYPGNFNDYEELKHLLSRINHFEKIQIIPKNSWSD
HEASGVSSACPYQGRSSFFRNVVWLTKKNNAYPTIKKSYNNTNQEDLLVLWGIHHPNDEAEQTRLYQNSTT
YISVGTSTLNQRLVPKIATRSKVNGQSGRMEFFWTILKSNDAINFESNGNFIAPENAYKIVKKGDSTIMKSE
LEYGNCNTKCQTPIGAINSSMPFHNIHPLTIGECPKYVKSNRLVLATGLRNSPQGERRRKKRGLFG
AIAGFIEGGWQGMVDGWYGYHHSNEQGSGYAADKESTQKAIDGVTNKVNSIIDKMNTQFEAVGREFNNLERR
IENLNKKMEDGFLDVWTYNAELLVLMENERTLDFHDSNVKNLYDKVRLQLKDNAKELGNGCFEFYHRCDNEC
MESVRNGTYDYPQYSEEARLKREEISGVKLESIGTYQILSIYSTVTSSLALAIMVAGLFLWMCSNGSLQCRI
CI
>AEN68621 Avian Israel 2011
(SEQ ID NO. 204)
MEKIVLLLAIVSIVKSDQICIGYHANNSTEQVDTIMEKNVTVTHAQDILEKTHNGKLCNLDGVKPLIL
RDCSVAGWLLGNPMCDEFLNVPEWSYIVEKINPANDLCYPGNFNDYEELKHLLSRINHFEKIQIIPKNSWSD
HEASGVSSACPYQGRSSFFRNVVWLTKKNDAYPTIKKSYNNTNQEDLLVIWGIHHPNDAAEQTRLYQNPTT
YISVGTSTLNQRLVPKIATRSKVNGQSGRMEFFWTILKSNDAINFESNGNFIAPENAYKIVKKGDSTIMKSE
LEYSNCNTKCQTPIGAINSSMPFHNIHPLTIGECPKYVKSNRLVLATGLRNSPQGEKRRKKRGLFG
AIAGFIEGGWQGMVDGWYGYHHSNEQGSGYAADKESTQKAIDGVTNKVNSIIDKMNTQFEAVGREFNNLERR
IENLNKKMEDGFLDVWTYNAELLVLMENERTLDFHDSNVKNLYDKVRLQLRDNAKELGNGCFEFYHRCDNEC
MESVRNGTYDYPQYSEEARLKREEISGVKLESIGTYQILSIYSTVASSLVLAIMVAGLFLWMCSNGSLQCRI
CI

[0758] Materials and Methods

### Cloning, Baculovirus Synthesis, Expression and Purification of HA

[0759] H5 WT and mutant HA sequences were codon-optimized for insect cell expression and synthesized at DNA2.0 (Menlo Park, Calif.). The synthesized genes were then sub-cloned into pAcGP67A plasmid and baculoviruses were created using Baculogold system (BD Biosciences, San Jose, Calif.) according to manufacturer's instructions. The recombinant baculoviruses were then used to infect suspension cultures of Sf9 cells cultured in BD Baculogold Max-XP SFM (BD Biosciences, San Jose, Calif.). The infection was monitored and the conditioned media was harvested 3-4 days post-infection. The soluble HA from the harvested conditioned media was purified using Nickel affinity chromatography (HisTrap HP columns, GE Healthcare, Piscataway, N.J.). Eluting fractions containing HA were pooled, concentrated and buffer exchanged into 1×PBS pH 8.0 (Gibco) using 100K MWCO spin columns (Millipore, Billerica, Mass.). The purified protein was quantified using BCA method (Pierce).

### Binding of Recombinant HA to Human Tracheal Tissue Sections

[0760] Paraffinized human tracheal (US Biological) tissue sections were deparaffinized, rehydrated and incubated with 1% BSA in PBS for 30 minutes to prevent non-specific binding. HA was pre-complexed with primary antibody (mouse anti 6×His tag, Abcam) and secondary antibody (Alexa fluor 488 goat anti mouse, Invitrogen) in a molar ratio of 4:2:1, respectively, for 20 minutes on ice. The tissue binding was performed over different HA concentrations by diluting the pre-complexed HA in 1% BSA-PBS. Tissue sections were then incubated with the HA-antibody complexes for 3 hours at RT. The tissue sections were counterstained by propidium iodide (Invitrogen; 1:100 in TBST). The tissue sections were mounted and then imaged using a confocal microscope (Zeiss LSM510 laser scanning confocal microscopy).

### Dose Dependent Direct Binding of WT and Mutant HA

[0761] To investigate the multivalent HA-glycan interactions a streptavidin plate array comprising representative biotinylated α2→3 and α2→6 sialylated glycans was used as described previously. 3′SLN, 3′SLN-LN, 3′SLN-LN-LN are representative avian receptors. 6′SLN and 6′SLN-LN are representative human receptors. LN corresponds to lactosamine (Galβ1-4GlcNAc) and 3′SLN and 6′SLN respectively correspond to Neu5Acα2-3 and Neu5Acα2-6 linked to LN (FIG. 28). The biotinylated glycans were obtained from the Consortium of Functional Glycomics through their resource request program. Streptavidin-coated High Binding Capacity 384-well plates (Pierce) were loaded to the full capacity of each well by incubating the well with 50 μl of 2.4 μM of biotinylated glycans overnight at 4° C. Excess glycans were removed through extensive washing with PBS. The trimeric HA unit comprises of three HA monomers (and hence three RBS, one for each monomer). The spatial arrangement of the biotinylated glycans in the wells of the streptavidin plate array favors binding to only one of the three HA monomers in the trimeric HA unit. Therefore in order to specifically enhance the multivalency in the HA-glycan interactions, the recombinant HA proteins were pre-complexed with the primary and secondary antibodies in the molar ratio of 4:2:1 (HA:primary:secondary). The identical arrangement of 4 trimeric HA units in the precomplex for all the HAs permits comparison between their glycan binding affinities. A stock solution containing appropriate amounts of Histidine tagged HA protein, primary antibody (Mouse anti 6×His tag IgG from Abcam) and secondary antibody (HRP conjugated goat anti Mouse IgG from Santacruz Biotechnology) in the ratio 4:2:1 and incubated on ice for 20 min. Appropriate amounts of precomplexed stock HA were diluted to 250 μl with 1% BSA in PBS. 50 μl of this precomplexed HA was added to each of the glycan-coated wells and incubated at room temperature for 3 hrs followed by the wash steps with PBS and PBST (1×PBS+0.05% Tween-20). The binding signal was determined based on HRP activity using Amplex Red Peroxidase Assay kit (Invitrogen, CA) according to the manufacturer's instructions.

### EQUIVALENTS

[0762] Those skilled in the art will recognize, or be able to ascertain using no more than routine experimentation, many equivalents to embodiments of the invention described herein. The scope of the present invention is not intended to be limited to the above Description, but rather is as set forth in the following claims:

We claim:

1. A phamaeutical compostion comprising:
a binding agent that comprises an H5 HA polypeptide having an amino acid sequence which differs from that of the reference H5 HA polypeptide sequence at one or more of residues selected from the group consisting of residues 130, 131, 132, 133, 135, 137, 155, 188, 192, 193, 221, 226, 227, 228, and combinations thereof.

2. The pharmaceutical composition of claim 1, wherein the binding agent competes a glycan HA polypeptide interaction between umbrella topology glycan and an HA polypeptide.

3. The pharmaceutical composition of claim 1, wherein the H5 HA polypeptide has a length within the range of 19-55 amino acids.

4. The pharmaceutical composition of claim 1, wherein the H5 HA polypeptide has amino acid sequence including a portion that is at least 19 amino acids in length and shows at least 95% overall sequence identity with a corresponding portion of an H5 HA polypeptide selected from the group consisting of SEQ ID numbers 50, 51, 53, 54, or 55.

5. The pharmaceutical composition of claim 1, wherein the H5 HA polypeptide has amino acid sequence that shows at least 95% identity with a reference H5 HA selected from the group consisting of SEQ ID numbers 50, 51, 53, 54, or 55, over a region corresponding to amino acids 1 to 55, but differs from that of the reference HA by one or more residues selected from the group consisting of residues 130, 192, 193, and combinations thereof.

6. The pharmaceutical composition of claim 1, wherein the H5 HA polypeptide has amino acid sequence that shows at least 95% identity with a reference H5 HA selected from the group consisting of SEQ ID numbers 50, 51, 53, 54, or 55, over a region corresponding to amino acids 1 to 55, but differs from that of the reference HA by one or more residues selected from the group consisting of residues 128-137, and combinations thereof.

7. The pharmaceutical composition of claim 1, wherein the H5 HA polypeptide has amino acid sequence that shows at least 95% identity with a reference H5 HA selected from the group consisting of SEQ ID numbers 50, 51, 53, 54, or 55, over a region corresponding to amino acids 1 to 55, but differs from that of the reference HA by the presence of a deletion of amino acid residue 130.

8. The pharmaceutical composition of claim 1, wherein the H5 HA polypeptide has amino acid sequence that shows at least 95% identity with a reference H5 HA selected from the group consisting of SEQ ID numbers 50, 51, 53, 54, or 55, over a region corresponding to amino acids 1 to 55, but differs from that of the reference HA by one or more of residues selected from the group consisting of residues 160, 226, 228, and combinations thereof.

9. The pharmaceutical composition of claim 1, wherein the H5 HA polypeptide has amino acid sequence that shows at least 95% identity with a reference H5 HA selected from the group consisting of SEQ ID numbers 50, 51, 53, 54, or 55, over a region corresponding to amino acids 1 to 55, but differs from that of the reference HA by one or more of residues selected from the group consisting of residues 158, 226, 228, and combinations thereof.

10. The pharmaceutical composition of claim 2, wherein the umbrella topology glycans comprise long α2-6 sialylated glycans.

11. The pharmaceutical composition of claim 10, wherein the long α2-6 sialylated glycans are selected from the group consisting of Neu5Acα2-6Galβ1-4GlcNAcβ1-3Galβ1-4GlcNAc, Neu5Acα2-6GalNAcβ1-4GlcNAcβ1-3GalNAcβ1-4GlcNAc, Neu5Acα2-6Galβ1-4GlcNAcβ1-3Galβ1-4GalNAc, Neu5Acα2-6Galβ1-4GlcNAcβ1-3Galβ1-4GlcNAcβ1-3Galβ1-3GalNAc, Neu5Acα2-6GalNAcβ1-4GlcNAcβ1-3Galβ1-4GalNAc, Neu5Acα2-6GalNAcβ1-4GlcNAcβ1-3GalNAcβ1-4GlcNAcβ1-3Galβ1-3GalNAc, NeuAcα2-3Galβ1-3GalNAcα2-6Neu5Ac, Neu5Acα2-6Galβ1-4GlcNAcβ1-3/6GalNAc, Neu5Acα2-6Galβ1-4GlcNAcβ1-3Galβ1-4GlcNAcβ1-3/6GalNAc, Neu5Acα2-6GalNAcβ1-4GlcNAcβ1-3/6GalNAc, Neu5Acα2-6GalNAcβ1-4GlcNAcβ1-3GalNAcβ1-4GlcNAcβ1-3/6GalNAc, NeuAcα2-6Galβ1-4GalNAcβ1-6GlcNAcβ1-3Galα2-3Neu5Ac, NeuAcα2-6Galβ1-4GalNAcβ1-3/6GlcNAcβ1-3/6Galα2-3/6Neu5Ac, Neu5Acα2-6Galβ1-3GalNAcβ1-4Galα1-3Galβ1-4Glc, Neu5Acα2-6Galβ1-3GalNAcβ1-3Galα1-4Galβ1-4Glc, Neu5Acα2-6Galβ1-3GlcNAcβ1-3Galβ1-4Glc and Neu5Acα2-6Galβ1-4GlcNAcβ1-3Galβ1-4Glc.

12. The pharmaceutical composition of claim 2, wherein the binding agent binds to umbrella topology glycans with an affinity that is at least 50%, at least 70%, at least 80%, at least 90% or at least 100% of that observed under comparable conditions for a wild type HA that mediates infection of humans.

13. The pharmaceutical composition of claim 2, wherein the binding agent binds to umbrella topology glycans more strongly than it binds to cone topology glycans.

14. The pharmaceutical composition of claim 2, wherein the binding agent shows a relative affinity for umbrella topology glycans versus cone topology glycans of at least 2.

15. The pharmaceutical composition of claim 2, wherein the binding agent shows a relative affinity for umbrella topology glycans versus cone topology glycans of at least 5.

16. The pharmaceutical composition of claim 2, wherein the binding agent shows a relative affinity for umbrella topology glycans versus cone topology glycans of at least 10.

17. The pharmaceutical composition of claim 2, wherein the interaction occurs between the HA polypeptide and receptors found on human upper respiratory epithelial cells, the bronchus, trachea, or the deep lung.

18. A vaccine composition comprising:
a binding agent that competes a glycan HA polypeptide interaction between umbrella topology glycan and an HA polypeptide,
wherein the vaccine is broadly protective against any H5 influenza virus.

19. The vaccine composition of claim 18, wherein said H5 influenza virus is a human-adapted H5 virus or avian-adapted H5 virus.

20. The vaccine composition of claim 19, wherein said H5 adapted virus comprises a H5 HA polypeptide sequence which differs from a reference H5 HA polypeptide sequence at one or more of residues selected from the group consisting of residues 130, 131, 132, 133, 135, 137, 155, 188, 192, 193, 221, 226, 227, 228, and combinations thereof.

21. A method of inhibiting binding of a H5 influenza virus to a hemagglutinin receptor having an umbrella topology, in a subject, or minimizing the risk of infection of a subject by an influenza virus which binds a hemagglutinin receptor having an umbrella topology, or treating a subject, the method comprising:
identifying a subject susceptible to or suffering from infection by an influenza virus,
selecting a binding agent that competes a glycan HA polypeptide interaction between an umbrella topology glycan and an HA polypeptide; and
administering an effective amount of the binding agent so that binding by the virus to hemagglutinin receptors having umbrella topology glycans is reduced, the risk is minimized, or the patient is treated.

22. The method of claim 21, wherein the binding agent comprises an H5 HA polypeptide sequence from a reference H5 HA polypeptide sequence at one or more of residues selected from the group consisting of residues 130, 131, 132, 133, 135, 137, 155, 188, 192, 193, 221, 226, 227, 228, and combinations thereof.

23. The method of claim 21, wherein the step of selecting includes selecting a binding agent on the basis of the binding agent being able to bind a hemagglutinin receptor having umbrella topology glycans.

24. The method of claim 21, wherein the binding agent is an LSBA

25. The method of claim 21, wherein the binding agent is a UTBA.

26. The method of claim 21, wherein the binding agent is a UTSBA.

27. The method of claim 26, wherein the UTSBA is administered to the subject prior to exposure to the virus.

28. The method of claim 26, wherein the UTSBA is administered to the subject after exposure to the virus.

29. The method of claim 21, wherein amount administered is sufficient to saturate the subject's HA receptors containing umbrella topology glycans.

30. The method of claim 26, wherein the UTSBA is administered by inhalation.

31. The method of claim 26, wherein the UTSBA is selected from the group consisting of antibodies, lectins, aptamers, and non-HA polypeptides.

32. The method of claim 26, wherein said UTSBA is administered in combination with administration of a second therapeutic.

33. The method of claim 32, wherein the second therapeutic is an anti-viral agent.

The application's sequence listing, which the Patent Office published only in electronic form, follows.

SEQUENCE LISTING (206 sequences)

SEQ ID NO: 1 - protein, 323 aa, Artificial Sequence
  NCBI influenza virus sequence
ENGTCYPGEFIDYEELREQLSSISSFEKFEIFPKASSWPNHETTKGVTAACSYSGASSFYRNLLWITKKGTSYPKLSKSYTNNKGKEVLVLWGVHHPPSVSEQQSLYQNADAYVSVGSSKYNRRFAPEIAARPEVRGQAGRMNYYWTLLDQGDTITFEATGNLIAPWYAFALNKGSDSGIITSDAPVHNCDTRCQTPHGALNSSLPFQNVHPITIGECPKYVKSTKLRMATGLRNVPSIQSRGLFGAIAGFIEGGWTGMIDGWYGYHHQNEQGSGYAADQKSTQNAIDGITSKVNSVIEKMNTQFTAVGKEFNNLERRIENLN

SEQ ID NO: 2 - protein, 323 aa, Artificial Sequence
  NCBI influenza virus sequence
ENGTCYPGDFIDYEELREQLSSVSSFEKFEIFPKTSSWPNHETTKGVTAACSYAGASSFYRNLLWLTKKGSSYPKLSKSYVNNKGKEVLVLWGVHHPPTGTDQQSLYQNADAYVSVGSSKYNRRFTPEIAARPKVRDQAGRMNYYWTLLEPGDTITFEATGNLIAPWYAFALNRGSGSGIITSDAPVHDCNTKCQTPHGAINSSLPFQNIHPVTIGECPKYVRSTKLRMATGLRNIPSIQSRGLFGAIAGFIEGGWTGMIDGWYGYHHQNEQGSGYAADQKSTQNAIDGITNKVNSVIEKMNTQFTAVGKEFNNLERRIENLN

SEQ ID NO: 3 - protein, 322 aa, Artificial Sequence
  NCBI influenza virus sequence
ENGTCYPGYFADYEELREQLSSVSSFERFEIFPKESSWPNHTVTGVSASCSHNGKSSFYRNLLWLTGKNGLYPNLSKSYVNNKEKEVLVLWGVHHPPNIGDQRALYHTENAYVSVVSSHYSRRFTPEIAKRPKVRDQEGRINYYWTLLEPGDTIIFEANGNLIAPWYAFALSRGFGSGIITSNAPMDECDAKCQTPQGAINSSLPFQNVHPVTIGECPKYVRSAKLRMVTGLRNIPSIQSRGLFGAIAGFIEGGWTGMVDGWYGYHHQNEQGSGYAADQKSTQNAINGITNKVNSVIEKMNTQFTAVGKEFNKLERRMENLN

SEQ ID NO: 4 - protein, 321 aa, Artificial Sequence
  NCBI influenza virus sequence
ANGLCYPGSFNDYEELKHLLTSVTHFEKVKILPRDQWTQHTTTGGSRACAVSGNPSFFRNMVWLTEKGSNYPIAKRSYNNTSGKQMLVIWGIHHPNDDTEQRTLYQNVGTYVSVGTSTLNKRSIPEIATRPKVNGQGGRMEFSWTLLETWDVINFESTGNLIAPEYGFKISKRGSSGIMKTEKTLENCETKCQTPLGAINTTLPFHNIHPLTIGECPKYVKSDRLVLATGLRNVPQIESRGLFGAIAGFIEGGWQGMVDGWYGYHHSNDQGSGYAADKESTQKAIDGITNKVNSVIEKMNTQFEAVGKEFNNLERRLENLN

SEQ ID NO: 5 - protein, 321 aa, Artificial Sequence
  NCBI influenza virus sequence
RDGLCYPGSFNDYEELKHLLSSVKHFEKVKILPKDRWTQHTTTGGSRACAVSGNPSFFRNMVWLTEKGSNYPVAKGSYNNTSGEQMLIIWGVHHPNDEKEQRTLYQNVGTYVSVGTSTLNKRSTPDIATRPKVNGLGSRMEFSWTLLDMWDTINFESTGNLIAPEYGFKISKRGSSGIMKTEGTLENCETKCQTPLGAINTTLPFHNVHPLTIGECPKYVKSEKLVLATGLRNVPQIESRGLFGAIAGFIEGGWQGMIDGWYGYHHSNDQGSGYAADKESTQKAFDGITNKVNSVIEKMNTQFEAVGKEFSNLERRLENLN

SEQ ID NO: 6 - protein, 316 aa, Artificial Sequence
  NCBI influenza virus sequence
FSNCYPYDIPDYASLRSLVASSGTLEFITEGFTWTGVTQNGGSSACKRGPANGFFSRLNWLTKSESAYPVLNVTMPNNDNFDKLYIWGVHHPSTNQEQTDLYVQASGRVTVSTRRSQQTIIPNIGSRPWVRGQPGRISIYWTIVKPGDVLVINSNGNLIAPRGYFKMRTGKSSIMRSDAPIDTCISECITPNGSIPNDKPFQNVNKITYGACPKYVKNTLKLATGMRNVPGKQTRGLFGAIAGFIENGWEGMIDGWYGFRHQNSEGTGQAADLKSTQAAIDQINRKLNRVIEKTNEKFHQIEKEFSEVEGRIQDLE

SEQ ID NO: 7 - protein, 315 aa, Artificial Sequence
  NCBI influenza virus sequence
FSNCYPYDVPDYASLRSLVASSGTLEFITEGFTWTGVTQNGGSNACKRGPGSGFFSRLNWLTKSGSTYPVLNVTMPNNDNFDKLYIWGIHHPSTNQEQTSLYVQASGRVTVSTRRSQQTIIPNIGSRPWVRGLSSRISTYWTIVKPGDVLVINSNGNLIAPRGYFKMRTGKSSIMRSDAPIDTCISECITPNGSIPNKPFQNVNKITYGACPKYVKQNTLKLATGMRNVPEKQTRGLFGAIAGFIENGWEGMIDGWYGFRHQNSEGTGQAALKSTQAATDQINGKLNRVIEKTNEKFHQIEKEFSEVEGRIQDLE

SEQ ID NO: 8 - protein, 316 aa, Artificial Sequence
  NCBI influenza virus sequence
FSNCYPYDVPDYASLRSLVASSGTLEFNNESFNWAGVTQNGTSSACKRRSNKSFFSRLNWLTHLKYKYPALNVIMPNNEKFDKLYIWGVHHPVTDSDQISLYAQASGRITVSTKRSQQTVIPNIGYRPRVRDISSRISTYWTIVKPGDILLINSTGNLIAPRGYFKIRSGKSSIMRSDAPIGKCNSECITPNGSIPNDKPFQNVNRITYGACPRYVKQNTLKLATGMRNVPEKQTRGIFGAIAGFIENGWEGMVDGWYGFRHQNSEGTGQAADLKSTQAAINQINGKLRLIGKTNEKFHQIEKEFSEVEGRIQDLE

SEQ ID NO: 9 - protein, 319 aa, Artificial Sequence
  NCBI influenza virus sequence
VDTCYPFDVPDYQSLRSILANNGKFEFIAEEFQWNTVKQNGKSGACKRANVNDFFNRLNWLTKSNGDAYPLQNLTKVNNGDYARLYIWGVHHPSTDTEQTDLYKNNPGRVTVSTKTSQTSVVPNIGSRPWVRGQSGRISFYWTIVDPGDIIVFNTIGNLIAPRCHYKLNSQKKSTILNTAVPIGSCVSKCHTDRGSITTTKPFQNISRISIGDCPKYVKQGSLKLATGMRNIPEKATRGLFGAIAGFIENGWQGLIDGWYGFRHQNAEGTGTAADLKSTQAAIDQINGKLRNLIEKTNEKYHQIEKEFEQVEGRIQDLE

SEQ ID NO: 10 - protein, 324 aa, Artificial Sequence
  NCBI influenza virus sequence
VNDLCYPGDFNYEELKHLLSRINHFEKIQIIPKSSWSSHEASLGVSSACPYQGKSSFFRNVVWLIKKNSTYPTIKRSYNNTNQEDLLVLWGTHHPNDAAEQTKLYQNPTTYISVGTSTLNQRLVPRIATRSKVNGQSGRHEFFWTILKPNDINFESNGNFIAPEYAYKIVKKGDSTIMKSELEYGNCNTKCQTMGAINSSMPFHNIHPLTIGECPKYVKSNRLVLATGLRNSPQRERRRRKKRGLFGAIAGFIEGGWQGMVDGWYGYHHSNEQGSGYAADKESTQKAIDGVTNKVNSIIDKMNTQFEAVGREFNWLERRIENLN

SEQ ID NO: 11 - protein, 326 aa, Artificial Sequence
  NCBI influenza virus sequence
ANDLCYPGDFNDYEELKHLLSRINHFEKIQIIPKNSWSSHEASLGVSSACPYQGKSSFFRNVVWLIKKNNAYPTIKRSYNNTNQEDLLVLWGIHHPNDAAEQTRLYQNPTTYISVGTSTLNQRLVPKIATRSKVNGQNGRMEFFWTILKPNDAINFESNGNFIAPEYAYKIVKKGDSAIMKSELEYGNCNTKCQTPMGAINSSMPFHNIHPLTIGECPKYVKNSRLVLATGLRNSPQRERRRKKRGLFGAIAGFIEGGWQGMVDGWYGYHHSNEQGSGYAADKESTQKAIDGVTNKVNSIIDKMNTQFEAVGREFNNLERRIENLN

SEQ ID NO: 12 - protein, 325 aa, Artificial Sequence
  NCBI influenza virus sequence
QNGICYPGTLNEIEELKALIGSGERIERFEMFPKSTWSGVNTNNGVTRACPDNSGSSFYRNLLWITKTNSAAYPVIKGTYNNTGNQPILYFWGVHHPPDTNAQNNLYGSGDRYVRMGTESMNFAKGPEISARPVVNGQRGRIDYYWSVLKPGETLNVESNGNLIAPWYAYKFVSTNSKGAVFKSNLPIENCDATCQTTIAGVLRTNKTFQNVSPLWIGKCPKYVKSESLRLATGLRNVPQIATRGLFGAIAGFIEGGWTGLVDGWYGYHHENSQGSGYAADREATQKAIDGITNKVNSIIDKMNTQFEAVDHEFSNLERRIDNMN

SEQ ID NO: 13 - protein, 319 aa, Artificial Sequence
  NCBI influenza virus sequence
SDVCYPGKFVNEEALRQILRESGGINKETMGFTYSGIRTNGATSTCRRSGSSFYAEMKWLLSNTDNAAFPQMTKSYKNTRKDPALIIWGIHHSGSTTEQTKLYGSGNKLITVESSNYQQSFVPSPGARPKVDGQSGRIDFHWLMLNPNDTITFSFNGAFIAPDRASFLRGKSMGIQSGVQVDDNCEGDCYHSGGTIISNLPFQNINSRAVGKCPRYVKQESLMLATGMKNVPEIPKGRGLFGAIAGFIENGWEGLIDGWYGFRHQNAQGEGTAADYKSTQSAIDQITGKLNRLIEKTNQQFELIDNEFTEVEKQIGNVI

SEQ ID NO: 14 - protein, 325 aa, Artificial Sequence
  NCBI influenza virus sequence
PEGMCYPGSVENLEELRFVFSSAASYKRIRLFDYSRWNVTRSGTSKACNASTGGQSFYRSINWLTKKKPDTYDFNEGAYVNNEDGDIIFLWGIHHPPDTKEQTTLYKNANTLSSVTTNTINRSFQPNIGPRPLVRGQQGRMDYYWGILKRGETLKIRTNGNLIAPEFGYLLKGESYGRIIQNEDIPIGNCNTKCQTYAGAINSSKPFQNASHRHYMGECPKYVKKASLRLAVGLRNTPSVEPRGLFGAIAGFIEGGWSGMIDGWYGFHHSNESEGTGMAADQKSTQEAIDKITNKVNNIVDKMNREFEVVNHEFSEVEKRINMIN

SEQ ID NO: 15 - protein, 316 aa, Artificial Sequence
  NCBI influenza virus sequence
VNGTCYPGNVENLEELRTLFSSASSYQRIQIFPDTIWNVTVTGTSKACSGSFYRSMRWLTQKSGSYPVQDAQYTNNREKSILFVWGIHHPPTDTAWTNLYINTDTTTSVTTEDLNRIFKPVIGPRPLVNGLQGRINYYWSVLKPGQTLRVRSNGNLIAPWYGHVLSGGSHGRILKTDLNSGNCVVQCQTEKGGLNSTLPFHNISKYAFGICPKYVRVKSLKLAVGLRNVPARSNRGLFGAIAGFIEGGWPGLVAGWYGFQHSNDQGVGMAADRDSTQRAIDKITSKVNNIVDKMNKQYEIIDHEFSEVETRLNMIN

SEQ ID NO: 16 - protein, 321 aa, Artificial Sequence
  NCBI influenza virus sequence
IAYCYPGATVNEEALRQKIMESGGIDKISTGFTYGSSINSAGTTRSCMRSGGNSFYAELKWLVSKNKGQNFPQTANTYRNTDSAEHLIIWGIHHPSSTQEKNDLYGTQSLSISVGSSTYQNNFVPVVGARPQVNGQSGRIDFHWTMVQPGDNITFSHNGGLIAPSRVSKLKGRGLGIQSGASVDNDCESKCFWKGGSINTKLPFQNLSPRTVGQCPKYVNKKSLLLATGMRNVPEVVQGRGLFGAIAGFIENGWEGMVDGWYGFRHQNAQGTGQAADYKSTQAAIDQITGKLNRLIEKTNTEFESIESEFSEIEHQIGNVI

SEQ ID NO: 17 - protein, 321 aa, Artificial Sequence
  NCBI influenza virus sequence
TNGICYPTLENEEELRLKFSGVLEFSKFEAFTSNGWGAVNSGAGVTAACKFGSSNSFFRNMIWLIHQSGTYPVIRRTFNNTKGRDVLVVWGVHHPATLKEHQDLYKKDSSYVAVDSESYNRRFTPEISTRPKVNGQAGRMTFYWTIVKPGEAITESNGAFLAPRYAFELVSLGNGKLFRSDLNIESCSTKCQSEIGGINTNRSFHNVHRNTIGDCPKYVNVKSLKLATLGLRNVPAIATRGLFGAIAGFIEGGWPGLINGWYGFQHRNEEGTGIAADKESTQKAIDQITSKVNNIVDRMNTNFESVQHEFSEIEERINQLS

SEQ ID NO: 18 - protein, 320 aa, Artificial Sequence
  NCBI influenza virus sequence
MEGVCYPGSIENQEELRSLFSSIKKYERVKMFDFTKWNVTYTGTSRACNNTSNRGSFYRSMRWLTLKSGQFPVQTDEYKNTRDSDILFTWAIHHPPTSAEQVQLYKNPDTLSSVTTDEINRSFKPNIGPRPLVRGQQGRMDYYWAVLKPGQTKIGTNGNLIAPEYGHLITGKSHGRILKNNLPVGQCVTECQLNEGVMNTSKPFQNTSKHYIGKCPKYIPSGSLKLAIGLRNVPQVQNRGLFGAIAGFIEGGWPGLVAGWYGFQHQNAEGTGMAADRDSTQKAIDNMQNKLNNVIDKMNKQFEVVNHEFSEVESRINMIN

SEQ ID NO: 19 - protein, 318 aa, Artificial Sequence
  NCBI influenza virus sequence
PHGLCYPGELNNNGELRHLFSGIRSFSRTELIPPTSWGEVLDGATSARDDKGTNSFYRNLVWFVKKNNRYPVISKTNNTTGRVLVLWGIHHPVSVEETKTLYVNSDPYTLVSTKSWSEKYKLETGVRPGYNGQRSWMKIYWSLLHPGEMITFESNGGLLAPRYGYIIEEYGKGRIFQSRIRMSKCNTKCQTSVGGINTNRTFQNIDKNALGDCPKYIKSGQLKLATGLRNVPAIDNRGLLGAIAGFIEGGWPGLINGWYGFQHQNEQGTGIAADKESTQKAIDQITTKINNIIDKMNGNYDSIRGEFNQVEKRINMLA

SEQ ID NO: 20 - protein, 317 aa, Artificial Sequence
  NCBI influenza virus sequence
VDTCYPFDVPDYQSLRSILASSGSLEFIAEQFTWNGVKVDGSSSACLRGGRNSFFSRLNWLTKETNGNTGPINVTKENTGSYVRLYLWGVHHPSSDNEQTDLYKVATGRVTVSTRSDQISIVPNIGSRPRVRNQSGRISIYWTLVNPGDSIIFNSIGNLIAPRGHYKISKSTKSTVLKSDKRIGSCTSPCLTDKGSIQSDKPFQNVSRIAIGNCPKYVKQGSLMLATGMRNIPGKQAKGLFGAIAGFIENGWQGLIDWYGFRHQNAEGTGTAADLKSTQAAIDQINKLNRLIEKTNEKYHQIEKEFEQVEGRIQDLE

SEQ ID NO: 21 - protein, 327 aa, Artificial Sequence
  NCBI influenza virus sequence
SDICYPGKFTNEEALRQIIRESGGIDKEPMGFRYSGIKTDGATSACKRTVSSFYSEMKWLLSSKANQVFPQLQTYRNNRKEPALIVWGVHHSSSLDEQNKLYGAGNKLITVGSSKYQQSFSPSPDRPKVNGQAGRIDFHWMLLDPGDTVTFTFNGAFIAPDRATFLRSNAPSGVEYNGKSLGIQSDAQIDESCEGECFYSGGTINSPLPFQNIDSWAVGRCPRYVKQSSLPLALGMKNVPEKIHTRGLFGAIAGFIENGWEGLIDGWYGFRHQNAQGQGTAADYKSTQAAIDQITGKLNRLIEKTNTQFELIDNEFTEVEQQIGNVI

SEQ ID NO: 22 - protein, 320 aa, Artificial Sequence
  NCBI influenza virus sequence
PNKLCFRGELDNNGELRHLFSGVNSFSRTELISPNKWGDILDGVTASCRDNGASSFYRNLVWIVKNKNGKYPVIKGDYNNTTGRDVLVLWGIHHPDTETTAINLYASKNPYTLVSTKEWSKRYELEIGTRIGDGQRSWMKLYWHLMRPGERIMFESNGGLIAPRYGYIIEKYGTGRIFQSGVRMAKCNTKCQTSLGGINTNKTFQNIERNALGDCPKYIKSGQLKLATGLRNVPSVGERGLFGAIAGFIEGGWPGLINGWYGFQHQNEQGTGIAADKASTQKAIDEITTKINNIIEKMNGNYDSIRGEFNQVEKRINMLA

SEQ ID NO: 23 - protein, 164 aa, Artificial Sequence
  HA glycan binding domain sequence
SYIIETSNSENGTCYPGEFIDYEELREQLSSISSFEKFEIFPKASSWPNHETTKGVTAACSYSGASSFYRNLLWITKKGTSYPKLSKSYTNNKGKEVLVLWGVHHPPSVSEQQSLYQNADAYVSVGSSKYNRRFAPEIAARPEVRGQAGRMNYYWTLLDQGDTI

SEQ ID NO: 24 - protein, 164 aa, Artificial Sequence
  HA glycan binding domain sequence
SYIVETSNSDNGTCYPGDFIDYEELREQLSSVSSFEKFEIFPKTSSWPNHETTRGVTAACPYAGASSFYRNLLWLVKKGNSYPKLSKSYVNNKGKEVLVLWGVHHPPTSTDQQSLYQNADAYVSVGSSKYDRRFTPEIAARPKVRGQAGRMNYYWTLLEPGDTI

SEQ ID NO: 25 - protein, 163 aa, Artificial Sequence
  HA glycan binding domain sequence
SYIVETPNSENGICYPGDFIDYEELREQLSSVSSFERFEIFPKESSWPNHNTNGVTAACSHEGKSSFYRNLLWLTEKEGSYPKLKNSYVNKKGKEVLVLWGIHHPPNSKEQQNLYQNENAYVSVVTSNYNRRFTPEIAERPKVRDQAGRMNYYWTLLKPGDTI

SEQ ID NO: 26 - protein, 164 aa, Artificial Sequence
  HA glycan binding domain sequence
SYIVETSNSENGTCYPGDFIDYEELREQLSSVSSFEKFEIFPKTSSWPNHETTKGVTAACSYAGASSFYRNLLWLTKKGSSYPKLSKSYVNNKGKEVLVLWGVHHPPTGTDQQSLYQNADAYVSVGSSKYNRRFTPEIAARPKVRDQAGRMNYYWTLLEPGDTI

SEQ ID NO: 27 - protein, 164 aa, Artificial Sequence
  HA glycan binding domain sequence
SYIAETPNPENGTCYPGYFADYEELREQLSSVSSFERFEIFPKESSWPNHTVTKGVTTSCSHNGKSSFYRNLLWLTKKNGLYPNVSKSYVNNKEKEVLVLWGVHHPSNIGDQRAIYHTENAYVSVVSSHYSRRFTPEIAKRPKVRDQEGRINYYWTLLEPGDTI

SEQ ID NO: 28 - protein, 164 aa, Artificial Sequence
  HA glycan binding domain sequence
SYIVETSNSENGTCYPGDFIDYEELREQLSSVSSFEKFEIFPKTSSWPNHETTKGVTAACSYAGASSFYRNLLWLTKKGSSYPKLSKSYVNNKGKEVLVLWGVHHPPTGTDQQSLYQNADAYVSVGSSKYNRRFTPEIAARPKVRGQAGRMNYYWTLLEPGDTI

SEQ ID NO: 29 - protein, 158 aa, Artificial Sequence
  HA glycan binding domain sequence
DLFVERSNAFSNCYPYDIPDYASRSLVASSGTLEFITEGFTWTGVTQNGGSSACKRGPANGFFSRLNWLTKSESAYPVLNVTMPNNDNFDKLYIWGVHHPSTNQEQTNLYVQASGRVTVSTRRSQQTIIPNIGSRPWVRGQPGRISIYWTIVKPGDVL

SEQ ID NO: 30 - protein, 159 aa, Artificial Sequence
  HA glycan binding domain sequence
DLFVERSKAFSNCYPYDVPDYASLRSLVASSGTLEFITEGFTWTGVTQNGGSNACKRGPGSGFFSRLNWLTKSGSTYPVLNVTMPNNDNFDKLYIWGIHHPSTNQEQTSLYVQASGRVTVSTRRSQQTIIPNIGSRPWVRGLSSRISIYWTIVKPGDVL

SEQ ID NO: 31 - protein, 157 aa, Artificial Sequence
  HA glycan binding domain sequence
DLFVERSKAYSNCYPYDVPDYASLRSLVASSGTLEFNNESFNWTGVANGTSSSCKRRSIKSFFSRLNWLHLKYRYPALNVTMPNNDKFDKLYIWGVHHPSTDSDQTSLYTQASGRVTVSTKRSQQTVIPNIGSRPWVRGISSRISIYWTIVKPGDLL

SEQ ID NO: 32 - protein, 163 aa, Artificial Sequence
  HA glycan binding domain sequence
SYIVEKDNPVNGLCYPENFNDYEELKHLLSSTNHFEKIRIIPRSSWSNHDASSGVSSACPYNGRSSFFRNVVWLIKKNNAYPTIKRSYNNTNQEDLLILWGIHHPNDAAEQTKLYQNPTTYVSVGTSTLNQRSVPEIATRPKVNGQSGRMEFFWTILKPNDAI

SEQ ID NO: 33 - protein, 163 aa, Artificial Sequence
  HA glycan binding domain sequence
SYIVEKANPVNDLCYPGDFNDYEELKHLLSRINHFEKIQIIPKSSWSSHEASLGVSSACPYQGKSSFFRNVVWLIKKNSTYPTIKRSYNNTNQEDLLVLWGIHHPNDAAEQTKLYQNPTTYISVGTSTLNQRLVPRIATRSKVNGQSGRMEFFWTIIKPNDAI

SEQ ID NO: 34 - protein, 570 aa, Artificial Sequence
  Sequence alignment illustrating conserved subsequences characteristic of H5 HA.
MEKIVLLLAIVSLVKSDQICIGYHANNSTEQVDTIMEKNVTVTHAQDILEKTHNGKLCDLDGVKPLILRDCSVAGWLLGNPMCDEFINVPEWSYIVEKANPANDLYCYPGDFNDYEELKHLLSRINHFEKIQIIPKSSWSDHEASSGVSSACPYQGKSSFFRNVVWLIKKNSAYPTIKKRSYNNTNQEDLLVLWGIHHPNDAAEQTKLYQNPTTYISVGTSTLNQRLVPKIATRSKVNGQSGRMEFFWTILKPNDAINFESNGNFIAPEYAYKIVKKGDSTIMKSELEYGNCNTKCQTPMGAINSSMPFHNIHPLTIGECPKYVKSNRLVLATGLRNSPQRERRRKKRGLFGAIAGFIEGGWQGMVDGWYGYHHSNEQGSGYAADKESTQKAIDGVTNKVNSIIDKMNTQFEAVGREFNNLERRIENLNKKMEDGFLDVWTYNAELLVLMENERTLDFHDSNVKNLYDKVRLQLRDNAKELGNGCFEFYHKCDNECMESVRNGTYDYPQYSEEARLKREEISGVKLESIGTYQILSIYSTVASSLALAIMVAGLSLWMCSNGSLQCRICI

SEQ ID NO: 35 - protein, 570 aa, Artificial Sequence
  Sequence alignment illustrating conserved subsequences characteristic of H5 HA.
MEKIVLLLAIVSLVKSDQICIGYHANNSTEQVDTIMEKNVTVTHAQDILEKTHNGKLCDLDGVKPLILRDCSVAGWLLGNPMCDEFINVPEWSYIVEKASPDNDLYCYPGDFNDYEELKHLLSRINHFEKIQIIPKSSWSNHEASSGVSSACPYHGKSSFFRNVVWLIKKNSAYPTIKKRSYNNTNQEDLLVLWGIHHPNDAAEQTKLYQNPTTYISVGTSTLNQRLVPKIATRSKVNGQSGRMEFFWTILKPNDAINFESNGNFIAPEYAYKIVKKGDSAIMKSELEYGNCNTKCQTPMGAINSSMPFHNIHPLTIGECPKYVKSNRLVLATGLRNTPQREGRRKKRGLFGAIAGFIEGGWQGMVDGWYGYHHSNEQGSGYAADKESTQKAIDGVTNKVNSIIDKMNTQFEAVGREFNKLERRIENLNKKMEDGFLDVWTYNAELLVLMENERTLDFHDSNVKNLYDKVRLQLRDNAKELGNGCFEFYHKCDNECMESVKNGTYDYPQYSEEARLNREEISGVKLESMGTYQILSIYSTVASSLALAIMVAGLSLWMCSNGSLQCRICI

SEQ ID NO: 36 - protein, 558 aa, Artificial Sequence
  Sequence alignment illustrating conserved subsequences characteristic of H5 HA.
MEKIVLLFAIVSLVKSDQICIGYHANNSTEQVDTIMEKNVTVTHAQDILEKTHNGKLCDLDGVKPLILRDCSVAGWLLGNPMCDEFINVPEWSYIVEKANPVNDLYCYPGDFNDYEELKHLLSRINHFEKIQIIPKSSWSSHEASLGVSSACPYQGKSSFFRNVVWLIKKNSTYPTIKKRSYNNTNQEDLLVLWGIHHPNDAAEQTKLYQNPTTYISVGTSTLNQRLVPRIATRSKVNGQSGRMEFFWTILKPNDAINFESNGNFIAPEYAYKIVKKGDSTIMKSELEYGNCNTKCQTPMGAINSSMPFHNIHPLTIGECPKYVKSNRLVLATGLRNSPQRERRRKKRGLFGAIAGFIEGGWQGMVDGWYGYHHSNEQGSGYAADKESTQKAIDGVTNKVNSIIDKMNTQFEAVGREFNNLERRIENLNKKMEDGFLDVWTYNAELLVLMENERTLDFHDSNVKNLYDKVRLQLRDNAKELGNGCFEFYHKCDNECMESVRNGTYDYPQYSEEARLKREEISGVKLESIGIYQILSIYSTVASSLALAIMVAGLSLWM

SEQ ID NO: 37 - protein, 570 aa, Artificial Sequence
  Sequence alignment illustrating conserved subsequences characteristic of H5 HA.
MEKIVLLFAIVSLVKSDQICIGYHANNSTEQVDTIMEKNVTVTHAQDILEKTHNGKLCDLDGVKPLILRDCSVAGWLLGNPMCDEFINVPEWSYIVEKANPVNDLYCYPGDFNDYEELKHLLSRINHFEKIQIIPKSSWSSHEASLGVSSACPYQGKPSFFRNVVWLIKKNSTYPTIKKRSYNNTNIEDLLILWGIHHPNDAAEQTKLYQNSNTYVSVGTSTLNQRSIPEIATRPKVNGQSGRMEFFWTILKPNDAINFESNGNFIAPEYAYKIVKKGDSTIMKSELEYGNCNTKCQTPMGAINSSMPFHNIHPLTIGECPKYVKSNRLVLATGLRNSPQRERRRKKRGLFGAIAGFIEGGWQGMVDGWYGYHHSNKQGSGYAADKESTQKAIDGVTNKVNSIIDKMNTQFEAVGREFNNLERRIENLNKKMEDGFLDVWTYNAELLVLMENERTLDFHDSNVKNLYDKVRLQLRDNAKELGNGCFEFYHKCDNECMESVRNGTYDYPQYSEEARLKREEISGVKLESIGIYQILSIYSTVASSLALAIMVAGLSLWMCSNGSLQCRICI

SEQ ID NO: 38 - protein, 566 aa, Artificial Sequence
  Sequence alignment illustrating conserved subsequences characteristic of H5 HA.
MERIVIALAIISIVKGDQICIGYHANNSTKQVDTIMEKNVTVTHAQDILEKEHNGKLCSLKGVRPLILKDCSVAGWLLGNPMCDEFLNVPEWSYIVEKDNPINGLYCYPGDFNDYEELKHLMSSTNHFEKIQIIPRSSWSNHDASSGVSSACPYNGRSSFFRNVVWLIKKNNAYPTIKKRTYNNTNIEDLLILWGIHHPNDAAEQTKLYQNSNTYVSVGTSTLNQRSIPEIATRPKVNGQSGRMEFFWTILKPNDAISFESNGNFIAPEYAYKIVKKGDSAIMKSELEYGNCDTKCQTPVGAINSSMPFHNVHPLTIGECPKYVKSDKLVLATGLRNVPQRETRGLFGAIAGFIEGGWQGMVDGWYGYHHSNEQGSGYAADKESTQKAIDGITNKVNSIIDKMNTQFETVGKEFNNLERRIENLNKKMEDGFLDVWTYNAELLVLMENERTLDFHDSNVKNLYDKVRLQLRDNAKELGNGCFEFYHKCDNECMESVRNGTYDYPQYSEESRLNREEIDGVKLESMGTYQILSIYSTVASSLALAIMVAGLSFWMCSNGSLQCRICI

SEQ ID NO: 39 - protein, 569 aa, Artificial Sequence
  Sequence alignment illustrating conserved subsequences characteristic of H5 HA.
MEKIVLLLAIVSLVKSDQICIGYHANNSTEQVDTIMEKNVTVTHAQDILEKTHNGKLCDLDGVKPLILKDCSVAGWLLGNPMCDEFINVPEWSYIVEKANPANDLYCYPGIFNDYEELKHLLSRINHFEKIQIIPKSSWSDHEASSGVSSACPYQGKSSFFRNVVWLIKKNSAYPTIKKISYNNTNQEDLLVLWGIHHPNDAAEQTRLYQNPTTYISVGTSTLNQRLVPKIATRSKVNGQSGRMEFFWTILKPNDAVNFESNGNFIAPEYAYKIVKKGDSTIMKSELEYGDCNTKCQTPMGAINSSMPFHNIHPLTIGECPKYVKSNRLVLATGLRNSPQRERRKKRGLFGAIAGFIEGGWQGMVDGWYGYHHSNEQGSGYAADKESTQKAIDGVTNKVNSIIDKMNTQFEAVGREFNNLERRIENLNKKMEDGFLDVWTYNAELLVLMENERTLDFHDSNVKNLYDKVRLQLRDNAKELGNGCFEFYHKCDNECMESVRNGTYDYPQYSEEARLKREEISGVKLESIGTYQILSIYSTVASSLALAIMVAGLSLWMCSNGSLQCRICI

SEQ ID NO: 40 - protein, 566 aa, Artificial Sequence
  Sequence alignment illustrating conserved subsequences characteristic of H5 HA.
VLLLAIVSLVKSDQICIGYHANNSTEQVDTIMEKNVTVTHAQDILEKTHNGKLCDLDGVKPLILRDCSVAGWLLGNPMCDEFLNVPEWSYIVEKINPANDLYCYPGNFNDYEELKHLLSRINHFEKIQIIPKSSWSDHEASSGVSSACPYQGRSSFFRNVVWLIKKDNAYPTIKKRSYNNTNQEDLLVLWGIHHPNDAAEQTRLYQNPTTYISVGTSTLNQRLVPKIATRSKVNGQSGRMEFFWTILKPNDAINFESNGNFIAPENAYKIVKKGDSTIMKSELEYGNCNTKCQTPIGAINSSMPFHNIHPLTIGECPKYVKSNRLVLATGLRNSPQREGRRKKRGLFGAIAGFIEGGWQGMVDGWYGYHHSNEQGSGYAADKESTQKAIDGVTNKVNSIIDKMNTQFEAVGREFNNLERRIENLNKKMEDGFLDVWTYNAELLVLMENERTLDFHDSNVKNLYDKVRLQLRDNAKELGNGCFEFYHRCDNECMESVRNGTYDYPQYSEEARLKREEISGVKLESIGTYQILSIYSTVASSLALAIMVAGLSLWMCSNGSLQCRICI

SEQ ID NO: 41 - protein, 557 aa, Artificial Sequence
  Sequence alignment illustrating conserved subsequences characteristic of H5 HA.
FAIVSLVKSDQICIGYHANNSTEQVDTIMEKNVTVTHAQDILEKTHNGKLCDLDGVKPLILRDCSVAGWLLGNPMCDEFLNVPEWSYIVEKINPANDLCYPGNFNDYEELKHLLSRINHFEKIQIIPKSSWSDHEASSGVSSACPYQGRSSFFRNVVWLIKKDNAYPTIKRSYNNTNQEDLLVLWGIHHPNDAAEQTRLYQNPTTYISVGTSTLNQRLVPKIATRSKVNGQSGRMEFFWTILKSNDAINFESNGNFIAPENAYKIVKKGDSTIMKSELEYGNCNTKCQTPIGAINSSMPFHNIHPLTIGECPKYVKSNRLVLATGLRNSPQGERRRKKRGLFGAIAGFIEGGWQGMVDGWYGYHHSNEQGSGYAADKESTQKAIDGVTNKVNSIIDKMNTQFEAVGREFNNLERRIENLNKKMEDGFLDVWTYNAELLVLMENERTLDFHDSNVKNLYDKVRLQLRDNAKELGNGCFEFYHRCDNECMESVRNGTYDYPQYSEEARLKREEISGVKLESIGTYQILSIYSTVASSLALAIMVAGLFLWMCSNGSVTM

SEQ ID NO: 42 - protein, 555 aa, Artificial Sequence
  Sequence alignment illustrating conserved subsequences characteristic of H5 HA.
MEKIVLLLAIVSLVKSDQICIGYHANNSTEQVDTIMEKNVTVTHAQDILEKTHNGKLCDLDGVKPLILRDCSVAGWLLGNPMCDEFINVPEWSYIVEKANPANDLYCYPGNFNDYEELKHLLSRINHFEKIQIIPKSSWSDHEASSGVSSACPYLGKSSFFRNVVWLIKKNSAYPTIKKRSYNNTNQEDLLVLWGIHHPNDAAEQTRLYQNPTTYISVGTSTLNQRLVPKIATRSKVNGQSGRMEFFWTILKPNDAINFESNGNFIAPEYAYKIVKKGDSAIMKSELEYGNCNTKCQTPMGAINSSMPFHNIHPLTIGECPKYVKSNRLVLATGLRNSPQRERRRKKRGLFGAIAGFIEGGWQGMVDGWYGYHHSNEQGSGYAADKESTQKAIDGVTNKVNSIIDKMNTQFEAVGREFNNLERRIENLNKKMEDGFLDVWTYNAELLVLMENERTLDFHDSNVKNLYDKVRLQLRDNAKELGNGCFEFYHKCDNECMESIRNGTYNYPQYSEEARLKREEISGVKLESIGIYQILSIYSTVASSLALAIMMAGLS

SEQ ID NO: 43 - protein, 566 aa, Artificial Sequence
  NCBI influenza virus sequence
MEARLLVLLCAFAATNADTICIGYHANNSTDTVDTVLEKNVTVTHSVNLLEDSHNGKLCKLKGIAPLQLGKCNIAGWLLGNPECDLLLTASSWSYIVETSNSENGTCYPGDFIDYEELREQLSSVSSFEKFEIFPKTSSWPNHETTKGVTAACSYAGASSFYRNLLWLTKKGSSYPKLSKSYVNNKGKEVLVLWGVHHPPTGTDQQSLYQNADAYVSVGSSKYNRRFTPEIAARPKVRDQAGRMNYYWTLLEPGDTITFEATGNLIAPWYAFALNRGSGSGIITSDAPVHDCNTKCQTPHGAINSSLPFQNIHPVTIGECPKYVRSTKLRMATGLRNIPSIQSRGLFGAIAGFIEGGWTGMIDGWYGYHHQNEQGSGYAADQKSTQNAIDGITNKVNSVIEKMNTQFTAVGKEFNNLERRIENLNKKVDDGFLDIWTYNAELLVLLENERTLDFHDSNVRNLYEKVKSQLKNNAKEIGNGCFEFYHKCDDACMESVRNGTYDYPKYSEESKLNREEIDGVKLESMGVYQILAIYSTVASSLVLLVSLGAISFWMCSNGSLQCRICI

SEQ ID NO: 44 - protein, 565 aa, Artificial Sequence
  NCBI influenza virus sequence
MKVKLLVLLCTFTATYADTICIGYHANNSTDTVDTVLEKNVTVTHSVNLLENSHNGKLCLLKGIAPLQLGNCSVAGWILGNPECELLISKESWSYIVEKPNPENGTCYPGHFADYEELREQLSSVSSFERFEIFPKESSWPNHTVTGVSASCSHNGESSFYRNLLWLTGKNGLYPNLSKSYANNKEKEVLVLWGVHHPPNIGDQKALYHTENAYVSVVSSHYSRKFTPEIAKRPKVRDQEGRINYYWTLLEPGDTIIFEANGNLIAPRYAFALSRGFGSGIINSNAPMDKCDAKCQTPQGAINSSLPFQNVHPVTIGECPKYVRSAKLRMVTGLRNIPSIQSRGLFGAIAGFIEGGWTGMVDGWYGYHHQNEQGSGYAADQKSTQNAINGITNKVNSVIEKMNTQFTAVGKEFNKLERRMENLNKKVDDGFIDIWTYNAELLVLLENERTLDFHDSNVKNLYEKVKSQLKNNAKEIGNGCFEFYHKCNDECMESVKNGTYDYPKYSEESKLNREKIDGVKLESMGVYQILAIYSTVASSLVLLVSLGAISFWMCSNGSLQCRICI

SEQ ID NO: 45 - protein, 566 aa, Artificial Sequence
  NCBI influenza virus sequence
MKAILVVLLYTFATANADTLCIGYHANNSTDTVDTVLEKNVTVTHSVNLLEDKHNGKLCKLRGVAPLHLGKCNIAGWILGNPECESLSTASSWSYIVETPSSDNGTCYPGDFIDYEELREQLSSVSSFERFEIFPKTSSWPNHDSNKGVTAACPHAGAKSFYKNLIWLVKKGNSYPKLSKSYINDKGKEVLVLWGIHHPSTSADQQSLYQNADTYVFVGSSRYSKKFKPEIAIRPKVRDQEGRMNYYWTLVEPGDKITFEATGNLVVPRYAFAMERNAGSGIIISDTPVHDCNTTCQTPKGAINTSLPFQNIHPITIGKCPKYVKSTKLRLATGLRNIPSIQSRGLFGAIAGFIEGGWTGMVDGWYGYHHQNEQGSGYAADLKSTQNAIDEITNKVNSVIEKMNTQFTAVGKEFNHLEKRIENLNKKVDDGFLDIWTYNAELLVLLENERTLDYHDSNVKNLYEKVRSQLKNNAKEIGNGCFEFYHKCDNTCMESVKNGTYDYPKYSEEAKLNREEIDGVKLESTRIYQILAIYSTVASSLVLVVSLGAISFWMCSNGSLQCRICI

SEQ ID NO: 46 - protein, 562 aa, Artificial Sequence
  NCBI influenza virus sequence
MAIIYLILLFTAVRGDQICIGYHANNSTEKVDTILERNVTVTHAKDILEKTHNGKLCKLNGIPPLELGDCSIAGWLLGNPECDRLLSVPEWSYIMEKENPRDGLCYPGSFNDYEELKHLLSSVKHFEKVKILPKDRWTQHTTTGGSRACAVSGNPSFFRNMVWLTKKGSNYPVAKGSYNNTSGEQMLIIWGVHHPNDETEQRTLYQNVGTYVSVGTSTLNKRSTPDIATRPKVNGLGSRMEFSWTLLDMWDTINFESTGNLIAPEYGFKISKRGSSGIMKTEGTLGNCETKCQTPLGAINTTLPFHNVHPLTIGECPKYVKSEKLVLATGLRNVPQIESRGLFGAIAGFIEGGWQGMVDGWYGYHHSNDQGSGYAADKESTQKAFDGITNRVNSVIEKMNTQFEAVGKEFSNLERRLENLNKKMEDGFLDVWTYNAELLVLMENERTLDFHDSNVKNLYDKVKMQLRDNVKELGNGCFEFYPKCDDECMNSVKNGTYDYPKYEEESKLNRNEIKGVKLSSMGVYQILAIYATVAGSLSLAIMMAGISFWMCSNGSLQCRICI

SEQ ID NO: 47 - protein, 566 aa, Artificial Sequence
  NCBI influenza virus sequence
MKTIIALSYIFCLALGQDLPGNDNSTATLCLGHHAVPNGTLVKTITDDQIEVTNATELVQSSSTGKICNNPHRILDGIDCTLIDALLGDPHCDVFQNETWDLFVERSKAFSNCYPYDVPDYASLRSLVASSGTLEFITEGFTWTGVTQNGGSNACKRGPGSGFFSRLNWLTKSGSTYPVLNVTMPNNDNFDKLYIWGIHHPSTNQEQTSLYVQASGRVTVSTRRSQQTIIPNIGSRPWVRGLSSRISIYWTIVKPGDVLVINSNGNLIAPRGYFKMRTGKSSIMRSDAPIDTCISECITPNGSIPNDKPFQNVNKITYGACPKYVKQNTLKLATGMRNVPEKQTRGLFGAIAGFIENGWEGMIDGWYGFRHQNSEGTGQAADLKSTQAAIDQINGKLNRVIEKTNEKFHQIEKEFSEVEGRIQDLEKYVEDTKIDLWSYNAELLVALENQHTIDLTDSEMNKLFEKTRRQLRENAEEMGNGCFKIYHKCDNACIESIRNGTYDHDVYRDEALNNRFQIKGVELKSGYKDWILWISFAISCFLLCVVLLGFIMWACQRGNIRCNICI

SEQ ID NO: 48 - protein, 566 aa, Artificial Sequence
  NCBI influenza virus sequence
MKTIIALSYILCLVFAQKLPGNDNSTATLCLGHHAVPNGTLVKTITNDQIEVTNATELVQSSSTGRICDSPHQILDGENCTLIDALLGDPHCDGFQNKEWDLFVERSKAYSNCYPYDVPDYASLRSLVASSGTLEFNNESFNWTGVAQNGTSSSCKRRSIKSFFSRLNWLHQLKYRYPALNVTMPNNDKFDKLYIWGVHHPSTDSDQTSLYTQASGRVTVSTKRSQQTVIPNIGSRPWVRGISSRISIYWTIVKPGDILLINSTGNLIAPRGYFKIRSGKSSIMRSDAPIGKCNSECITPNGSIPNDKPFQNVNRITYGACPRYVKQNTLKLATGMRNVPEKQTRGIFGAIAGFIENGWEGMMDGWYGFRHQNSEGTGQAADLKSTQAAINQINGKLNRLIEKTNEKFHQIEKEFSEVEGRIQDLEKYVEDTKIDLWSYNAELLVALENQHTIDLTDSEMNKLFERTRKQLRENAEDMGNGCFKIYHKCDNACIGSIRNGTYDHDVYRDEALNNRFQIKGVELKSGYKDWILWISFAISCFLLCVVLLGFIMWACQKGNIRCNICI

SEQ ID NO: 49 - protein, 566 aa, Artificial Sequence
  NCBI influenza virus sequence
MKTIIALSYILCLVFAQKLPGNDNSTATLCLGHHAVPNGTIVKTITNDQIEVTNATELVQSSSTGEICDSPHQILDGKNCTLIDALLGDPQCDGFQNKKWDLFVERSKAYSNCYPYDVPDYASLRSLVASSGTLEFNNESFNWTGVTQNGTSSACIRRSKNSFFSRLNWLTHLNFKYPALNVTMPNNEQFDKLYIWGVHHPGTDKDQIFLYAQASGRITVSTKRSQQTVSPNIGSRPRVRNIPSRISIYWTIVKPGDILLINSTGNLIAPRGYFKIRSGKSSIMRSDAPIGKCNSECITPNGSIPNDKPFQNVNRITYGACPRYVKQNTLKLATGMRNVPEKQTRGIFGAIAGFIENGWEGMVDGWYGFRHQNSEGRGQAADLKSTQAAIDQINGKLNRLIGKTNEKFHQIEKEFSEVEGRIQDLEKYVEDTKIDLWSYNAELLVALENQHTIDLTDSEMNKLFEKTKKQLRENAEDMGNGCFKIYHKCDNACIGSIRNGTYDHDVYRDEALNNRFQIKGVELKSGYKDWILWISFAISCFLLCVALLGFIMWACQKGNIRCNICI

SEQ ID NO: 50 - protein, 568 aa, Artificial Sequence
  NCBI influenza virus sequence
MEKIVLLFAIVSLVKSDQICIGYHANNSTEQVDTIMEKNVTVTHAQDILEKKHNGKLCDLDGVKPLILRDCSVAGWLLGNPMCDEFINVPEWSYIVEKANPVNDLCYPGDFNDYEELKHLLSRINHFEKIQIIPKSSWSSHEASLGVSSACPYQGKSSFFRNVVWLIKKNSTYPTIKRSYNNTNQEDLLVLWGIHHPNDAAEQTKLYQNPTTYISVGTSTLNQRLVPRIATRSKVNGQSGRMEFFWTILKPNDAINFESNGNFIAPEYAYKIVKKGDSTIMKSELEYGNCNTKCQTPMGAINSSMPFHNIHPLTIGECPKYVKSNRLVLATGLRNSPQRERRRKKRGLFGAIAGFIEGGWQGMVDGWYGYHHSNEQGSGYAADKESTQKAIDGVTNKVNSIIDKMNTQFEAVGREFNNLERRIENLNKKMEDGFLDVWTYNAELLVLMENERTLDFHDSNVKNLYDKVRLQLRDNAKELGNGCFEFYHKCDNECMESVRNGTYDYPQYSEEARLKREEISGVKLESIGIYQILSIYSTVASSLALAIMVAGLSLWMCSNGSLQCRICI

SEQ ID NO: 51 - protein, 568 aa, Artificial Sequence
  NCBI influenza virus sequence
MEKIVLLLAIVSLVKSDQICIGYHANNSTEQVDTIMEKNVTVTHAQDILEKTHNGKLCDLDGVKPLILRDCSVAGWLLGNPMCDEFLNVPEWSYIVEKINPANDLCYPGNFNDYEELKHLLSRINHFEKIQIIPKSSWSDHEASSGVSSACPYQGRSSFFRNVVWLIKKDNAYPTIKRSYNNTNQEDLLVLWGIHHPNDAAEQTRLYQNPTTYISVGTSTLNQRLVPKIATRSKVNGQSGRMEFFWTILKSNDAINFESNGNFIAPENAYKIVKKGDSTIMKSELEYGNCNTKCQTPIGAINSSMPFHNIHPLTIGECPKYVKSNRLVLATGLRNSPQGERRRKKRGLFGAIAGFIEGGWQGMVDGWYGYHHSNEQGSGYAADKESTQKAIDGVTNKVNSIIDKMNTQFEAVGREFNNLERRIENLNKKMEDGFLDVWTYNAELLVLMENERTLDFHDSNVKNLYDKVRLQLRDNAKELGNGCFEFYHRCDNECMESVRNGTYDYPQYSEEARLKREEISGVKLESIGTYQILSIYSTVASSLALAIMVAGLFLWMCSNGSLQCRICI

SEQ ID NO: 52 - protein, 552 aa, Artificial Sequence
  NCBI influenza virus sequence
MNTQILAFIACVLTGVKGDKICLGHHAVANGTKVNTLTERGIEVVNATETVETTNIKKICTQGKRPTDLGQCGLLGTLIGPPQCDQFLEFSSDLIIERREGTDICYPGRFTNEESLRQILRRSGGIGKESMGFTYSGIRTNGATSACTRSGSSFYAEMKWLLSNSDNAAFPQMTKAYRNPRNKPALIIWGVHHSESVSEQTKLYGSGNKLITVRSSKYQQSFTPNPGARRIDFHWLLLDPNDTVTFTFNGAFIAPDRTSFFRGESLGVQSDAPLDSSCRGDCFHSGGTIVSSLPFQNINSRTVGKCPRYVKQKSLLLATGMRNVPEKPKPRGLFGAIAGFIENGWEGLINGWYGFRHQNAQGEGTAADYKSTQSAIDQITGKLNRLIGKTNQQFELIDNEFNEIEQQIGNVINWTRDAMTEIWSYNAELLVAMENQHTIDLADSEMSKLYERVKKQLRENAEEDGTGCFEIFHKCDDQCMESIRNNTYDHTQYRTESLQNRIQIDPVKLSSGYKDIILWFSFGASCFLLLAIAMGLVFICIKNGNMQCTICI

SEQ ID NO: 53 - protein, 568 aa, Artificial Sequence
  NCBI influenza virus sequence
MEKIVLLLATVSLVKSDQICIGYHANNSTEQVDTIMEKNVTVTHAQDILERTHNGKLCDLNGVKPLILRDCSVAGWLLGNPMCDEFINVPEWSYIVEKASPANDLCYPGNFNDYEELKHLLSRINHFEKIQIIPKSSWSNHDASSGVSSACPYLGRSSFFRNVVWLIKKNSAYPTIKRSYNNTNQEDLLVLWGIHHPNDAAEQTKLYQNPTTYISVGTSTLNQRLVPEIATRPKVNGQSGRMEFFWTILKPNDAINFESNGNFIAPEYAYKIVKKGDSTIMKSELEYGNCNTKCQTPMGAINSSMPFHNIHPLTIGECPKYVKSNRLVLATGLRNTPQRERRRKKRGLFGAIAGFIEGGWQGMVDGWYGYHHSNEQGSGYAADKESTQKAIDGVTNKVNSIINKMNTQFEAVGREFNNLERRIENLNKKMEDGFLDVWTYNAELLVLMENERTLDFHDSNVKNLYDKVRLQLRDNAKELGNGCFEFYHKCDNECMESVKNGTYDYPQYSEEARLNREEISGVKLESMGTYQILSIYSTVASSLALAIMVAGLSLWMCSNGSLQCRICI

SEQ ID NO: 54 - protein, 568 aa, Artificial Sequence
  NCBI influenza virus sequence
MEKIVLLFAIVSLVKSDQICIGYHANNSTEQVDTIMEKNVTVTHAQDILEKTHNGKLCDLDGVKPLILRDCSVAGWLLGNPMCDEFINVPEWSYIVEKANPANDLCYPGDFNDYEELKHLLSRINHFEKIQIIPKNSWSSHEASLGVSSACPYQGKSSFFRNVVWLIKKNNAYPTIKRSYNNTNQEDLLVLWGIHHPNDAAEQTRLYQNPTTYISVGTSTLNQRLVPKIATRSKVNGQNGRMEFFWTILKPNDAINFESNGNFIAPEYAYKIVKKGDSAIMKSELEYGNCNTKCQTPMGAINSSMPFHNIHPLTIGECPKYVKSNRLVLATGLRNSPQRERRRKKRGLFGAIAGFIEGGWQGMVDGWYGYHHSNEQGSGYAADKESTQKAIDGVTNKVNSIIDKMNTQFEAVGREFNNLERRIENLNKKMEDGFLDVWTYNAELLVLMENERTLDFHDSNVKNLYDKVRLQLRDNAKELGNGCFEFYHKCDNECMESVRNGTYDYPQYSEEARLKREEISGVKLESIGTYQILSIYSTVASSLALAIMVAGLSLWMCSNGSLQCRICI

SEQ ID NO: 55 - protein, 568 aa, Artificial Sequence
  NCBI influenza virus sequence
MEKIVLLLAIVSLVKSDQICIGYHANNSTEQVDTIMEKNVTVTHAQDILEKTHNGKLCDLDGVKPLILRDCSVAGWLLGNPMCDEFINVPEWSYIVEKANPTNDLCYPGSFNDYEELKHLLSRINHFEKIQIIPKSSWSDHEASSGVSSACPYLGSPSFFRNVVWLIKKNSTYPTIKKSYNNTNQEDLLVLWGIHHPNDAAEQTMLYQNPTTYISIGTSTLNQRLVPKIATRSKVNGQSGRMEFFWTILKPNDAINFESNGNFIAPEYAYKIVKKGDSAIMKSELEYGNCNTKCQTPMGAINSSMPFHNIHPLTIGECPKYVKSNRLVLATGLRNSPQRESRRKKRGLFGAIAGFIEGGWQGMVDGWYGYHHSNEQGSGYAADKESTQKAIDGVTNKVNSIIDKMNTQFEAVGREFNNLERRIENLNKKMEDGFLDVWTYNAELLVLMENERTLDFHDSNVKNLYDKVRLQLRDNAKELGNGCFEFYHKCDNECMESIRNGTYNYPQYSEEARLKREEISGVKLESIGTYQILSIYSTVASSLALAIMMAGLSLWMCSNGSLQCRICI

SEQ ID NO: 56 - protein, 570 aa, Artificial Sequence
  NCBI influenza virus sequence
MRLVAKLLYLAVLAICGLGIHGALTHPRVTPPVYPSVSFNLTGADTYEPFLRALQEKVILGNHTAFDLPVLNPESQVSDSNRFVLVPLTNPSGDTVTLAIDVVNLYVVAFSSNGKSYFFSGSTAVQRDNLFVDTTQEELNFTGNYTSLERQVGFGRVYIPLGPKSLDQAISSLRTYTLTAGDTKPLARGLLVVIQMVSEAARFRYIELRIRTSITDASEFTPDLLMLSMENNWSSMSSEIQQAQPGGIFAGVVQLRDERNNSIEVTNFRRLFELTYIAVLLYGCAPVTSSSYSNNAIDAQIIKMPVFRGGEYEKVCSVVEVTRRISGWDGLCVDVRYGHYIDGNPVQLRPCGNECNQLWTFRTDGTIRWLGKCLTASSSVMIYDCNTVPPEATKWVVSIDGTITNPHSGLVLTAPQAAEGTALSLENNIHAARQGWTVGDVEPLVTFIVGYKQMCLRENGENNFVWLEDCVLNRVQQEWALYGDGTIRVNSNRSLCVTSEDHEPSDLIVILKCEGSGNQRWVFNTNGTISNPNAKLLMDVAQRDVSLRKIILYRPTGNPNQQWITTTHPA

SEQ ID NO: 57 - protein, 569 aa, Artificial Sequence
  NCBI influenza virus sequence
MKVVATILYLVVLAICGLGIHGAHPTHSAPPTVYPSVSFNLTEANSNEYRHFLQELRGKVILGSHRAFDLPVLNPESKVSDSDRFVLVRLTNPSRKKVTLAIDVVTFYVVAFAQNDRSYFFSGSSEVQRENLFVDTTQEDLNFKGDYTSLEHQVGFGRVYIPLGPKSLAQSISSLSTYKSSAGDNKRLARSLLVVIQMVSEAARFRYIQLRIQASITDAKEFTPDLLMLSMENKWSSMSSEIQQAQPGGAFAQVVKLLDQRNHPIDVTNFRRLFQLTSVAVLLHGCPTVTKMPAYIIKMPVFNGGEDEERCSVVEEVTRRIGGRDGFCAEVKNGDEKDGTPVQLSSCGEQSNQQWTFSTDGTIQSLGKCLTTSSSVMIYNCKVVPPESTKWVVSIDGTITNPRSGLVLTAPKAAEGTLVSLEKNVHAARQGWIVGNVEPLVTFIVGYEQMCLETNPGNNDVSLGDCSVKSASKVDQKWALYGDGTIRVNNDRSLCVTSEGKSSNEPIIILKCLGWANQRWVFNTDGTISNPDSKLVMHVDQNDVPLRKIILSHPSGTSNQQWIASTHPA

SEQ ID NO: 58 - protein, 286 aa, Artificial Sequence
  NCBI influenza virus sequence
MSFQGHGIYYIASAYVANTRLALSEDSSANKSPDVIISSDAVDPLNNLWLIEPVGEADTYTVRNAFAGSYMDLAGHAATDGTAIIGYRPTGGDNQKWIISQINDVWKIKSKETGTFVTLLNGDGGGTGTVVGWQNITNNTSQNWTFQKLSQTGANVHATLLACPALRQDFKSYLSDGLYLVLTRDQISSIWQASGLGSTPWRSEIFDCDDFATVFKGAVAKWGNENFKANGFALLCGLMFGSKSSGAHAYNWFVERGNFSTVTFFEPQNGTYSANAWDYKAYFGLF

SEQ ID NO: 59 - protein, 292 aa, Artificial Sequence
  NCBI influenza virus sequence
MSFEGHGIYHIPHAHVANIRMALANRGSGQNGTPVIAWDSNNDAFDHMWLVEPTGEADTYTIHNVSTGTYMDVTASAVADNTPIIGYQRTGNDNQKWIIRQVQTDGGDRPWKIQCKATGTFATLYSGGGSGTAIVGWRLVNSNGNQDWVFQKLSQTSVNVHATLLACGATVGQDFKNYLYDGLYLVLPRDRISAIWKASGLGETARRDGIYDSDEFAMTFKSAAATWGKENFKADGFAILCGMMFGTKASTNRHAYNWVVERGSFSTVTFFEPQNGTYSDDAWGYKAYFGLF

SEQ ID NO: 60 - protein, 568 aa, Artificial Sequence
  NCBI influenza virus sequence
MEKIVLLFAIVSLVKSDQICIGYHANNSTEQVDTIMEKNVTVTHAQDILEKKHNGKLCDLDGVKPLILRDCSVAGWLLGNPMCDEFINVPEWSYIVEKANPVNDLCYPGDFNDYEELKHLLSRINHFEKIQIIPKSSWSDHEASSGVSSACPYQGKPSFFRNVVWLIKKNNTYPTIKRSYNNTNQEDLLVLWGIHHPNDAAEQTRLYQNPTTYISVGTSTLNQRLVPRIATRSKVNGQSGRMEFFWTILKPNDAINFESNGNFIAPEYAYKIVKKGDSTIMKSELEYGNCNTKCQTPMGAINSSMPFHNIHPLTIGECPKYVKSNRLVLATGLRNSPQRERRRKKRGLFGAIAGFIEGGWQGMVDGWYGYHHSNEQGSGYAADKESTQKAIDGVTNKVNSIIDKMNTQFEAVGREFNNLERRIENLNKKMEDGFLDVWTYNAELLVLMENERTLDFHDSNVKNLYDKVRLQLRDNAKELGNGCFEFYHKCDNECMESVRNGTYDYPQYSEEARLKREEISGVKLESIGIYQILSIYSTVASSLALAIMVAGLSLWMCSNGSLQCRICI

SEQ ID NO: 61 - protein, 567 aa, Artificial Sequence
  NCBI influenza virus sequence
MEKIVLLFAIVSLVKSDQICIGYHANNSTEQVDTIMEKNVTVTHAQDILEKKHNGKLCDLDGVKPLILRDCSVAGWLLGNPMCDEFINVPEWSYIVEKANPVNDLCYPGDFNDYEELKHLLSRINHFEKIQIIPKSSWSDHTTTGGSRACPYQGKPSFFRNVVWLTKKNNTYPTIKRSYNNTNQEDLLVLWGIHHPNDEAEQRALYQNPTTYISVGTSTLNQRLVPRIATRPKVNGLGSRMEFFWTILKPNDAINFESNGNFIAPEYAYKIVKKGDSTIMKSELEYGNCNTKCQTPMGAINSSMPFHNIHPLTIGECPKYVKSNRLVLATGLRNSPQRERRRKKRGLFGAIAGFIEGGWQGMVDGWYGYHHSNEQGSGYAADKESTQKAIDGVTNKVNSIIDKMNTQFEAVGREFNNLERRIENLNKKMEDGFLDVWTYNAELLVLMENERTLDFHDSNVKNLYDKVRLQLRDNAKELGNGCFEFYHKCDNECMESVRNGTYDYPQYSEEARLKREEISGVKLESIGIYQILSIYSTVASSLALAIMVAGLSLWMCSNGSLQCRICI

SEQ ID NO: 62 - protein, 567 aa, Artificial Sequence
  NCBI influenza virus sequence
MEKIVLLFAIVSLVKSDQICIGYHANNSTEQVDTIMEKNVTVTHAQDILEKKHNGKLCDLDGVKPLILRDCSVAGWLLGNPMCDEFINVPEWSYIVEKANPVNDLCYPGDFNDYEELKHLLSRINHFEKIQIIPKSSWSDHTTTGGSRACPYQGKPSFFRNVVWLTKKNNAYPTIKRSYNNTNQEDLLVLWGIHHPNDEAEQRALYQNPTTYISVGTSTLNQRLVPRIATRPKVNGLGSRMEFFWTILKPNDAINFESNGNFIAPEYAYKIVKKGDSTIMKSELEYGNCNTKCQTPMGAINSSMPFHNIHPLTIGECPKYVKSNRLVLATGLRNSPQRERRRKKRGLFGAIAGFIEGGWQGMVDGWYGYHHSNEQGSGYAADKESTQKAIDGVTNKVNSIIDKMNTQFEAVGREFNNLERRIENLNKKMEDGFLDVWTYNAELLVLMENERTLDFHDSNVKNLYDKVRLQLRDNAKELGNGCFEFYHKCDNECMESVRNGTYDYPQYSEEARLKREEISGVKLESIGIYQILSIYSTVASSLALAIMVAGLSLWMCSNGSLQCRICI

SEQ ID NO: 63 - protein, 567 aa, Artificial Sequence
  NCBI influenza virus sequence
MEKIVLLFAIVSLVKSDQICIGYHANNSTEQVDTIMEKNVTVTHAQDILEKKHNGKLCDLDGVKPLILRDCSVAGWLLGNPMCDEFINVPEWSYIVEKANPVNDLCYPGDFNDYEELKHLLSRINHFEKIQIIPKSSWSDHASSGVSRACPYQGKPSFFRNVVWLIKKNNTYPTIKRSYNNTNQEDLLVLWGIHHPNDEAEQRALYQNPTTYISVGTSTLNQRLVPRIATRSKVNGLGSRMEFFWTILKPNDAINFESNGNFIAPEYAYKIVKKGDSTIMKSELEYGNCNTKCQTPMGAINSSMPFHNIHPLTIGECPKYVKSNRLVLATGLRNSPQRERRRKKRGLFGAIAGFIEGGWQGMVDGWYGYHHSNEQGSGYAADKESTQKAIDGVTNKVNSIIDKMNTQFEAVGREFNNLERRIENLNKKMEDGFLDVWTYNAELLVLMENERTLDFHDSNVKNLYDKVRLQLRDNAKELGNGCFEFYHKCDNECMESVRNGTYDYPQYSEEARLKREEISGVKLESIGIYQILSIYSTVASSLALAIMVAGLSLWMCSNGSLQCRICI

SEQ ID NO: 64 - protein, 568 aa, Artificial Sequence
  NCBI influenza virus sequence
MEKIVLLFAIVSLVKSDQICIGYHANNSTEQVDTIMEKNVTVTHAQDILEKKHNGKLCDLDGVKPLILRDCSVAGWLLGNPMCDEFINVPEWSYIVEKANPVNDLCYPGDFNDYEELKHLLSRINHFEKIQIIPKSSWSDHEASSGVSSACPYQGKPSFFRNVVWLIKKNNAYPTIKRSYNNTNQEDLLVLWGIHHPNDAAEQTRLYQNPTTYISVGTSTLNQRLVPRIATRSKVNGLSSRMEFFWTILKPNDAINFESNGNFIAPEYAYKIVKKGDSTIMKSELEYGNCNTKCQTPMGAINSSMPFHNIHPLTIGECPKYVKSNRLVLATGLRNSPQRERRRKKRGLFGAIAGFIEGGWQGMVDGWYGYHHSNEQGSGYAADKESTQKAIDGVTNKVNSIIDKMNTQFEAVGREFNNLERRIENLNKKMEDGFLDVWTYNAELLVLMENERTLDFHDSNVKNLYDKVRLQLRDNAKELGNGCFEFYHKCDNECMESVRNGTYDYPQYSEEARLKREEISGVKLESIGIYQILSIYSTVASSLALAIMVAGLSLWMCSNGSLQCRICI

SEQ ID NO: 65 - protein, 568 aa, Artificial Sequence; identical to SEQ ID NO: 51
  NCBI influenza virus sequence

SEQ ID NO: 66 - protein, 568 aa, Artificial Sequence
  NCBI influenza virus sequence
MEKIVLLLAIVSLVKSDQICIGYHANNSTEQVDTIMEKNVTVTHAQDILEKTHNGKLCDLDGVKPLILRDCSVAGWLLGNPMCDEFLNVPEWSYIVEKINPANDLCYPGNFNDYEELKHLLSRINHFEKIQIIPKSSWSDHEASSGVSSACPYQGRSSFFRNVVWLIKKDNAYPTIKRSYNNTNQEDLLVLWGIHHPNDAAEQTRLYQNPTTYISVGTSTLNQRLVPKIATRSKVNGLSSRMEFFWTILKSNDAINFESNGNFIAPENAYKIVKKGDSTIMKSELEYGNCNTKCQTPIGAINSSMPFHNIHPLTIGECPKYVKSNRLVLATGLRNSPQGERRRKKRGLFGAIAGFIEGGWQGMVDGWYGYHHSNEQGSGYAADKESTQKAIDGVTNKVNSIIDKMNTQFEAVGREFNNLERRIENLNKKMEDGFLDVWTYNAELLVLMENERTLDFHDSNVKNLYDKVRLQLRDNAKELGNGCFEFYHRCDNECMESVRNGTYDYPQYSEEARLKREEISGVKLESIGTYQILSIYSTVASSLALAIMVAGLFLWMCSNGSLQCRICI

SEQ ID NO: 67 - protein, 568 aa, Artificial Sequence
  NCBI influenza virus sequence
MEKIVLLLAIVSLVKSDQICIGYHANNSTEQVDTIMEKNVTVTHAQDILEKTHNGKLCDLDGVKPLILRDCSVAGWLLGNPMCDEFLNVPEWSYIVEKINPANDLCYPGNFNDYEELKHLLSRINHFEKIQIIPKSSWSDHEASSGVSSACPYQGRSSFFRNVVWLIKKDNAYPTIKRSYNNTNQEDLLVLWGIHHPNDAAEQTRLYQNPTTYISVGTSTLNQRLVPKIATRSKVNGLSGRMEFFWTILKSNDAINFESNGNFIAPENAYKIVKKGDSTIMKSELEYGNCNTKCQTPIGAINSSMPFHNIHPLTIGECPKYVKSNRLVLATGLRNSPQGERRRKKRGLFGAIAGFIEGGWQGMVDGWYGYHHSNEQGSGYAADKESTQKAIDGVTNKVNSIIDKMNTQFEAVGREFNNLERRIENLNKKMEDGFLDVWTYNAELLVLMENERTLDFHDSNVKNLYDKVRLQLRDNAKELGNGCFEFYHRCDNECMESVRNGTYDYPQYSEEARLKREEISGVKLESIGTYQILSIYSTVASSLALAIMVAGLFLWMCSNGSLQCRICI

SEQ ID NO: 68 - protein, 568 aa, Artificial Sequence
  NCBI influenza virus sequence
MEKIVLLFAIVSLVKSDQICIGYHANNSTEQVDTIMEKNVTVTHAQDILEKKHNGKLCDLDGVKPLILRDCSVAGWLLGNPMCDEFINVPEWSYIVEKANPVNDLCYPGDFNDYEELKHLLSRINHFEKIQIIPKSSWSDHEASSGVSSACPYQGKPSFFRNVVWLIKKNNAYPTIKRSYNNTNQEDLLVLWGIHHPNDAAEQTRLYQNPTTYISVGTSTLNQRLVPRIATRSKVNGLSGRMEFFWTILKPNDAINFESNGNFIAPEYAYKIVKKGDSTIMKSELEYGNCNTKCQTPMGAINSSMPFHNIHPLTIGECPKYVKSNRLVLATGLRNSPQRERRRKKRGLFGAIAGFIEGGWQGMVDGWYGYHHSNEQGSGYAADKESTQKAIDGVTNKVNSIIDKMNTQFEAVGREFNNLERRIENLNKKMEDGFLDVWTYNAELLVLMENERTLDFHDSNVKNLYDKVRLQLRDNAKELGNGCFEFYHKCDNECMESVRNGTYDYPQYSEEARLKREEISGVKLESIGIYQILSIYSTVASSLALAIMVAGLSLWMCSNGSLQCRICI

SEQ ID NO: 69 - protein, 568 aa, Artificial Sequence
  NCBI influenza virus sequence
MEKIVLLLAIIGLVKSDQICVGYHANNSTEQVDTIMEKNITVTHAQDILEKTHNGKLCNLNGVKPLILKDCSVAGWLLGNPMCDEFLNVSEWSYIVEKASPANGLCYPGDFNDYEELKHLLSRINHFEKIKIIPKSYWSNHETSLGVSSACSYLENPSFFRNVVWLTKKNNTYPPIKVNYTNANQKDLLVLWGIHHPNNEAEQKMIYQNLNTYVSVGTSTLNQRLVPKIATRSKVNGQSGRMDFFWTILKPNDTINFDSNGNFIAPEYAYKIVKKGDSAIMKSELEYGNCNTKCQTPIGAINSSMPFHNIHPLTIGECPKYVKSNRLVLATGLRNAPQIEGRRRKRGLFGAIAGFIEGGWQGMVDGWYGYHHSNEQGSGYAADKESTQKAIDGITNKINSIIDKMNTQFEAVGREFNNLERRIENLNKKMEDGFLDVWTYNAELLVLMENERTLDFHDSNVKNLYEKVRLQLRDNAKELGNGCFEFYHKCDNECMESVKNGTYDYPQYSEEARLNREEISGVKLESIVTYQILSIYSTVASSLALAIMVAGLSLWMCSNGSLQCRICI

SEQ ID NO: 70 - protein, 567 aa, Artificial Sequence
  NCBI influenza virus sequence
MEKIVLLLAIIGLVKSDQICVGYHANNSTEQVDTIMEKNITVTHAQDILEKTHNGKLCNLNGVKPLILKDCSVAGWLLGNPMCDEFLNVSEWSYIVEKASPANGLCYPGDFNDYEELKHLLSRINHFEKIKIIPKSYWSNHTSTGVSRACSYLENPSFFRNVVWLTKKNNTYPPIKVNYTNANQKDLLVLWGIHHPNDEAEQKMIYQNLNTYVSVGTSTLNQRLVPKIATRSKVNGLGSRMDFFWTILKPNDTINFDSNGNFIAPEYAYKIVKKGDSAIMKSELEYGNCNTKCQTPIGAINSSMPFHNIHPLTIGECPKYVKSNRLVLATGLRNAPQIEGRRRKRGLFGAIAGFIEGGWQGMVDGWYGYHHSNEQGSGYAADKESTQKAIDGITNKINSIIDKMNTQFEAVGREFNNLERRIENLNKKMEDGFLDVWTYNAELLVLMENERTLDFHDSNVKNLYEKVRLQLRDNAKELGNGCFEFYHKCDNECMESVKNGTYDYPQYSEEARLNREEISGVKLESIVTYQILSIYSTVASSLALAIMVAGLSLWMCSNGSLQCRICI

SEQ ID NO: 71 - protein, 567 aa, Artificial Sequence
  NCBI influenza virus sequence
MEKIVLLLAIIGLVKSDQICVGYHANNSTEQVDTIMEKNITVTHAQDILEKTHNGKLCNLNGVKPLILKDCSVAGWLLGNPMCDEFLNVSEWSYIVEKASPANGLCYPGDFNDYEELKHLLSRINHFEKIKIIPKSYWSNHTSTGVSRACSYLENPSFFRNVVWLTKKNNTYPPIKVNYTNANQKDLLVLWGIHHPNNEAEQKMIYQNLNTYVSVGTSTLNQRLVPKIATRSKVNGLGSRMDFFWTILKPNDTINFDSNGNFIAPEYAYKIVKKGDSAIMKSELEYGNCNTKCQTPIGAINSSMPFHNIHPLTIGECPKYVKSNRLVLATGLRNAPQIEGRRRKRGLFGAIAGFIEGGWQGMVDGWYGYHHSNEQGSGYAADKESTQKAIDGITNKINSIIDKMNTQFEAVGREFNNLERRIENLNKKMEDGFLDVWTYNAELLVLMENERTLDFHDSNVKNLYEKVRLQLRDNAKELGNGCFEFYHKCDNECMESVKNGTYDYPQYSEEARLNREEISGVKLESIVTYQILSIYSTVASSLALAIMVAGLSLWMCSNGSLQCRICI

SEQ ID NO: 72 - protein, 567 aa, Artificial Sequence
  NCBI influenza virus sequence
MEKIVLLLAIIGLVKSDQICVGYHANNSTEQVDTIMEKNITVTHAQDILEKTHNGKLCNLNGVKPLILKDCSVAGWLLGNPMCDEFLNVSEWSYIVEKASPANGLCYPGDFNDYEELKHLLSRINHFEKIKIIPKSYWSNHTSTGVSRACSYLENPSFFRNVVWLTKKNNTYPPIKVNYTNANQKDLLVLWGIHHPNNEAEQKMIYQNLNTYVSVGTSTLNQRLVPKIATRSKVNGLGGRMDFFWTILKPNDTINFDSNGNFIAPEYAYKIVKKGDSAIMKSELEYGNCNTKCQTPIGAINSSMPFHNIHPLTIGECPKYVKSNRLVLATGLRNAPQIEGRRRKRGLFGAIAGFIEGGWQGMVDGWYGYHHSNEQGSGYAADKESTQKAIDGITNKINSIIDKMNTQFEAVGREFNNLERRIENLNKKMEDGFLDVWTYNAELLVLMENERTLDFHDSNVKNLYEKVRLQLRDNAKELGNGCFEFYHKCDNECMESVKNGTYDYPQYSEEARLNREEISGVKLESIVTYQILSIYSTVASSLALAIMVAGLSLWMCSNGSLQCRICI

SEQ ID NO: 73 - protein, 567 aa, Artificial Sequence
  NCBI influenza virus sequence
MEKIVLLLAIVSLVKSDQICIGYHANNSTEQVDTIMEKNVTVTHAQDILEKTHNGKLCNLDGVKPLILRDCSVAGWLLGNPMCDEFLNVPEWSYIVEKINPANDLCYPGNFNDYEELKHLLSRINHFEKIQIIPKNSWSDHEASGVSSACPYQGRSSFFRNVVWLTKKDNAYPTIKRSYNNTNQEDLLVLWGIHHPNDAAEQTRLYQNPTTQISVGTSTLNQRLVPKIATRSKVNGQSGRMEFFWTILKSNDAINFESNGNFIAPENAYKIVKKGDSTIMKSELEYGNCNTKCQTPIGAINSSMPFHNIHPLTIGECPKYVKSNRLVLATGLRNSPQGERRRKRRGLFGAIAGFIEGGWQGMVDGWYGYHHSNEQGSGYAADKESTQKAIDGVTNKVNSIIDKMNTQFEAVGREFNNLERRIENLNKKMEDGFLDVWTYNAELLVLMENERTLDFHDSNVKNLYDKVRLQLRDNAKELGNGCFEFYHRCDNECMESVRNGTYDYPQYSEEARLKREEISGVKLESIGTYQILSIYSTVASSLALAIMVAGLFLWMCSNGSLQCRICI

SEQ ID NO: 74 - protein, 567 aa, Artificial Sequence
  NCBI influenza virus sequence
MEKIVLLLAIVSLVKSDQICIGYHANNSTEQVDTIMEKNVTVTHAQDILEKTHNGKLCNLDGVKPLILRDCSVAGWLLGNPMCDEFLNVPEWSYIVEKINPANDLCYPGNFNDYEELKHLLSRINHFEKIQIIPKNSWSDHEASGVSSACPYQGRSSFFRNVVWLTKKDNAYPTIKRSYNNTNQEDLLVLWGIHHPNDAAEQTRLYQNPTTQISVGTSTLNQRLVPKIATRSKVNGLSSRMEFFWTILKSNDAINFESNGNFIAPENAYKIVKKGDSTIMKSELEYGNCNTKCQTPIGAINSSMPFHNIHPLTIGECPKYVKSNRLVLATGLRNSPQGERRRKRRGLFGAIAGFIEGGWQGMVDGWYGYHHSNEQGSGYAADKESTQKAIDGVTNKVNSIIDKMNTQFEAVGREFNNLERRIENLNKKMEDGFLDVWTYNAELLVLMENERTLDFHDSNVKNLYDKVRLQLRDNAKELGNGCFEFYHRCDNECMESVRNGTYDYPQYSEEARLKREEISGVKLESIGTYQILSIYSTVASSLALAIMVAGLFLWMCSNGSLQCRICI

SEQ ID NO: 75 - protein, 567 aa, Artificial Sequence
  NCBI influenza virus sequence
MEKIVLLLAIVSLVKSDQICIGYHANNSTEQVDTIMEKNVTVTHAQDILEKTHNGKLCNLDGVKPLILRDCSVAGWLLGNPMCDEFLNVPEWSYIVEKINPANDLCYPGNFNDYEELKHLLSRINHFEKIQIIPKNSWSDHTASGVSRACPYQGRSSFFRNVVWLTKKDNAYPTIKRSYNNTNQEDLLVLWGIHHPNDEAEQRALYQNPTTQISVGTSTLNQRLVPKIATRSKVNGLGSRMEFFWTILKSNDAINFESNGNFIAPENAYKIVKKGDSTIMKSELEYGNCNTKCQTPIGAINSSMPFHNIHPLTIGECPKYVKSNRLVLATGLRNSPQGERRRKRRGLFGAIAGFIEGGWQGMVDGWYGYHHSNEQGSGYAADKESTQKAIDGVTNKVNSIIDKMNTQFEAVGREFNNLERRIENLNKKMEDGFLDVWTYNAELLVLMENERTLDFHDSNVKNLYDKVRLQLRDNAKELGNGCFEFYHRCDNECMESVRNGTYDYPQYSEEARLKREEISGVKLESIGTYQILSIYSTVASSLALAIMVAGLFLWMCSNGSLQCRICI

SEQ ID NO: 76 - protein, 150 aa, Artificial Sequence
  NCBI influenza virus sequence
PANDLCYPGNFNDYEELKHLLSRINHFEKIQIIPKSSWSNHDASSGVSSACPYLGRSSFFRNVVWLIKKNSAYPTIKRSYNNTNQEDLLVLWGIHHPNDAAEQTKLYQNPTTYISVGTSTLNQRLVPEIATRPKVNGQSGRMEFFWTILK

SEQ ID NO: 77 - protein, 150 aa, Artificial Sequence
  NCBI influenza virus sequence
PANDLCYPGDFNDYEELKHLLSRINHFEKIQIIPKSSWPNHEASLGVSSACPYLGESSFFRNVVWLIKKNSSYPTIKRSYNNTNQEDLLVLWGIHHPNDAAEQIKLYQNPNTYISVGTSTLNQRLVPTIATRSKVNGQSGRMEFFWTILK

SEQ ID NO: 78 - protein, 150 aa, Artificial Sequence
  NCBI influenza virus sequence
PANDLCYPGNFNDYEELKHLLSRINHFEKIQIIPKSSWSDHEASSGVSSACPYQGTPSFFRNVVWLIKKNNTYPTIKRSYNNTNQEDLLILWGIHHSNDAAEQTKLYQNPTTYISVGTSTLNQRLVPKIATRSKVNGQSGRMDFFWTILK

SEQ ID NO: 79 - protein, 150 aa, Artificial Sequence
  NCBI influenza virus sequence
PANDLCYPGNFNDYEELKHLLSRINHFEKIQIIPKDSWSDHEASLGVSSACPYQGNSSFFRNVVWLIKKGNAYPTIKKSYNNTNQEDLLVLWGIHHPNDEAEQTRLYQNPTTYISTGTSTLNQRLVPKIATRSKVNGQSGRIDFFWTILK

SEQ ID NO: 80 - protein, 150 aa, Artificial Sequence
  NCBI influenza virus sequence
PANDLCYPGNFNDYEELKHLLSRINHFEKIQIIPKSSWSDHEASSGVSSACPYQGRSSFFRNVVWLIKKDNAYPTIKRSYNNTNQEDLLVLWGIHHPNDAAEQTRLYQNPTTYISVGTSTLNQRLVPKIATRSKVNGQSGRMEFFWTILK

SEQ ID NO: 81 - protein, 150 aa, Artificial Sequence
  NCBI influenza virus sequence
PANDLCYPGDFNDYEELKHLLSRINHFEKIQIIPKSSWSDYEASSGVSSACPYQGRSSFFRNVVWLIKKNNAYPTIKRSYNNTNQEDLLVLWGIHHPNDAAEQIRLYQNPTTYISVGTSTLNQRLVPKIATRSKVNGQSGRMEFFWTILK

SEQ ID NO: 82 - protein, 150 aa, Artificial Sequence
  NCBI influenza virus sequence
  misc_feature (50)..(50): Xaa can be any naturally occurring amino acid
PANDLCYPGNFNNYEELKHLLSRINRFEKIQIIPKSSWPDHEASLGVSSXCPYQGGPSFYRNVVWLIKKNNTYPTIKKSYHNTNQEDLLVLWGIHHPNDEAEQTRIYKNPTTYISVGTSTLNQRLVPKIATRSKVNGQSGRMEFFWTILK

SEQ ID NO: 83 - protein, 150 aa, Artificial Sequence
  NCBI influenza virus sequence
PVNDLCYPGDFNDYEELKHLLSRINHFEKIQIIPKSSWSSHEASLGVSSACPYQGKSSFFRNVVWLIKKNSTYPTIKRSYNNTNQEDLLVLWGIHHPNDAAEQTKLYQNPTTYISVGTSTLNQRLVPRIATRSKVNGQSGRMEFFWTILK

SEQ ID NO: 84 - protein, 150 aa, Artificial Sequence; identical to SEQ ID NO: 83
  NCBI influenza virus sequence

SEQ ID NO: 85 - protein, 150 aa, Artificial Sequence
  NCBI influenza virus sequence
PANDLCYPGDFNDYEELKHLLSRINHFEKIQIIPKNSWSSHEASLGVSSACPYQGKSSFFRNVVWLIKKNNAYPTIKRSYNNTNQEDLLVLWGIHHPNDAAEQTRLYQNPTTYISVGTSTLNQRLVPKIATRSKVNGQNGRMEFFWTILK

SEQ ID NO: 86 - protein, 150 aa, Artificial Sequence
  NCBI influenza virus sequence
PANDLCYPGNFNDYEELKHLLSRINHFEKIQIIPKSSWSDHEASSGVSSACPYQGKSSFFRNVVWLIKKNSAYPTIKRSYNNTNQEDLLVLWGIHHPNDAAEQTRLYQNPTTYISVGTSTLNQRLVPKIATRSKVNGQSGRMEFFWTILK

SEQ ID NO: 87 - protein, 150 aa, Artificial Sequence
  NCBI influenza virus sequence
PTNDLCYPGSFNDYEELKHLLSRINHFEKIQIIPKSSWSDHEASSGVSSACPYLGSPSFFRNVVWLIKKNSTYPTIKKSYNNTNQEDLLVLWGIHHPNDAAEQTRLYQNPTTYISIGTSTLNQRLVPKIATRSKVNGQSGRMEFFWTILK

SEQ ID NO: 88 - protein, 150 aa, Artificial Sequence
  NCBI influenza virus sequence
PANGLCYPGDFNDYEELKHLLSRINHLKKIKIIPKSYWSNHEASSGVSAACSYLGEPSFFRNVVWLIKKNNTYPPIKVNYTNTNQEDLLVLWGIHHPNDEKEQIRIYQNPNTSISVGTSTLNQRLVPKIATRPKVNGQSGRMEFFWTILK

SEQ ID NO: 89 - protein, 149 aa, Artificial Sequence
  NCBI influenza virus sequence
PRDGLCYPGSFNDYEELKHLLSSVKHFEKVKILPKDRWTQHTTTGGSRACAVSGNPSFFRNMVWLTKKGSNYPVAKGSYNNTSGEQMLIIWGVHHPNDETEQRTLYQNVGTYVSVGTSTLNKRSTPDIATRPKVNGLGSRMEFSWTLLD

SEQ ID NO: 90 - protein, 150 aa, Artificial Sequence
  NCBI influenza virus sequence
PVNDLCYPGDFNDYEELKHLLSRINHFEKIQIIPKSSWSDHEASSGVSSACPYQGKPSFFRNVVWLIKKNNTYPTIKRSYNNTNQEDLLVLWGIHHPNDAAEQTRLYQNPTTYISVGTSTLNQRLVPRIATRSKVNGQSGRMEFFWTILK

SEQ ID NO: 91 - protein, 149 aa, Artificial Sequence
  NCBI influenza virus sequence
PVNDLCYPGDFNDYEELKHLLSRINHFEKIQIIPKSSWSDHTTTGGSRACPYQGKPSFFRNVVWLTKKNNTYPTIKRSYNNTNQEDLLVLWGIHHPNDEAEQRALYQNPTTYISVGTSTLNQRLVPRIATRPKVNGLGSRMEFFWTILK

SEQ ID NO: 92 - protein, 149 aa, Artificial Sequence
  NCBI influenza virus sequence
PVNDLCYPGDFNDYEELKHLLSRINHFEKIQIIPKSSWSDHASSGVSRACPYQGKPSFFRNVVWLIKKNNTYPTIKRSYNNTNQEDLLVLWGIHHPNDEAEQRALYQNPTTYISVGTSTLNQRLVPRIATRSKVNGLGSRMEFFWTILK

SEQ ID NO: 93 - protein, 149 aa, Artificial Sequence
  NCBI influenza virus sequence
PANDLCYPGNFNDYEELKHLLSRINHFEKIQIIPKNSWSDHEASGVSSACPYQGRSSFFRNVVWLTKKDNAYPTIKRSYNNTNQEDLLVLWGIHHPNDAAEQTRLYQNPTTQISVGTSTLNQRLVPKIATRSKVNGQSGRMEFFWTILK

SEQ ID NO: 94 - protein, 149 aa, Artificial Sequence
  NCBI influenza virus sequence
PANDLCYPGNFNDYEELKHLLSRINHFEKIQIIPKNSWSDHTASGVSRACPYQGRSSFFRNVVWLTKKDNAYPTIKRSYNNTNQEDLLVLWGIHHPNDEAEQRALYQNPTTQISVGTSTLNQRLVPKIATRSKVNGLGSRMEFFWTILK

SEQ ID NO: 95 - protein, 150 aa, Artificial Sequence
  NCBI influenza virus sequence
PANGLCYPGDFNDYEELKHLLSRINHFEKIKIIPKSYWSNHETSLGVSSACSYLENPAFFRNVVWLTKKNNTYPPIKVNYTNANQKDLLVLWGIHHPNNEAEQKMIYQNLNTYVSVGTSTLNQRLVPKIATRSKVNGQSGRMDFFWTILK

SEQ ID NO: 96 - protein, 149 aa, Artificial Sequence
  NCBI influenza virus sequence
PANGLCYPGDFNDYEELKHLLSRINHFEKIKIIPKSYWSNHTSTGVSRACSYLENPSFFRNVVWLTKKNNTYPPIKVNYTNANQKDLLVLWGIHHPNDEAEQKMIYQNLNTYVSVGTSTLNQRLVPKIATRSKVNGLGSRMDFFWTILK

SEQ ID NO: 97 - protein, 149 aa, Artificial Sequence
  NCBI influenza virus sequence
PANGLCYPGDFNDYEELKHLLSRINHFEKIKIIPKSYWSNHTSTGVSRACSYLENPSFFRNVVWLTKKNNTYPPIKVNYTNANQKDLLVLWGIHHPNNEAEQKMITQNLNTYVSVGTSTLNQRLVPKIATRSKVNGLGGRMDFFWTILK

SEQ ID NO: 98 - protein, 119 aa, Artificial Sequence
  NCBI influenza virus sequence
LSSVKHFEKVKILPKDRWTQHTTTGGSRACAVSGNPSFFRNMVWLTKKGSNYPVAKGSYNNTSGEQMLIIWGVHHPNDETEQRTLYQNVGTYVSVGTSTLNKRSTPDIATRPKVNGLGS

SEQ ID NO: 99 - protein, 119 aa, Artificial Sequence
  NCBI influenza virus sequence
LSRINHFEKIQIIPKNSWSDHEASGVSSACPYQGRSSFFRNVVWLTKKDNAYPTIKRSYNNTNQEDLLVLWGIHHPNDAAEQTRLYQNPTTQISVGTSTLNQRLVPKIATRSKVNGQSG

SEQ ID NO: 100 - protein, 119 aa, Artificial Sequence
  NCBI influenza virus sequence
LSRINHFEKIQIIPKNSWSDHEASGVSSACPYQGRSSFFRNVVWLTKKDNAYPTIKRSYNNTNQEDLLVLWGIHHPNDAAEQTRLYQNPTTQISVGTSTLNQRLVPKIATRSKVNGLSS

SEQ ID NO: 101 - protein, 120 aa, Artificial Sequence
  NCBI influenza virus sequence
LSRINHFEKIQIIPKSSWSDHEASSGVSSACPYQGRSSFFRNVVWLIKKDNAYPTIKRSYNNTNQEDLLVLWGIHHPNDAAEQTRLYQNPTTYISVGTSTLNQRLVPKIATRSKVNGQSG

SEQ ID NO: 102 - protein, 120 aa, Artificial Sequence
  NCBI influenza virus sequence
LSRINHFEKIQIIPKSSWSDHEASSGVSSACPYLGSPSFFRNVVWLIKKNSTYPTIKKSYNNTNQEDLLVLWGIHHPNDAAEQTMLYQNPTTYISIGTSTLNQRLVPKIATRSKVNGQSG

SEQ ID NO: 103 - protein, 120 aa, Artificial Sequence
  NCBI influenza virus sequence
LSRINHFEKIQIIPKSSWSSHEASLGVSSACPYQGKSSFFRNVVWLIKKNSTYPTIKRSYNNTNQEDLLVLWGIHHPNDAAEQTKLYQNPTTYISVGTSTLNQRLVPRIATRSKVNGQSG

SEQ ID NO: 104 - protein, 120 aa, Artificial Sequence
  NCBI influenza virus sequence
LSRINHFEKIQIIPKNSWSSHEASLGVSSACPYQGKSSFFRNVVWLIKKNNAYPTIKRSYNNTNQEDLLVLWGIHHPNDAAEQTRLYQNPTTYISVGTSTLNQRLVPKIATRSKVNGQNG

SEQ ID NO: 105 - protein, 119 aa, Artificial Sequence
  NCBI influenza virus sequence
LSRINHFEKIQIIPKSSWSNHDASSGVSSACPYLGRSSFFRNVVWLKKNSAYPTIKRSYNNTNQEDLLVLWGIHHPNDAAEQTKLYQNPTTYISVGTSTLNQRLVPEIATRPKVNGQSG

SEQ ID NO: 106 - protein, 106 aa, Artificial Sequence
  HA sequence element consensus sequence element
  MISC_FEATURE (2)..(2): X= Tyr or Phe
  MISC_FEATURE (4)..(33): X= any amino acid
  MISC_FEATURE (34)..(34): X is absent or any amino acid
  MISC_FEATURE (35)..(35): X is absent or any amino acid
  MISC_FEATURE (36)..(36): X is absent or any amino acid
  MISC_FEATURE (37)..(37): X is absent or any amino acid
  MISC_FEATURE (38)..(38): X is absent or any amino acid
  MISC_FEATURE (39)..(39): X is absent or any amino acid
  MISC_FEATURE (40)..(40): X is absent or any amino acid
  MISC_FEATURE (41)..(41): X is absent or any amino acid
  MISC_FEATURE (42)..(42): X is absent or any amino acid
  MISC_FEATURE (43)..(43): X is absent or any amino acid
  MISC_FEATURE (44)..(44): X is absent or any amino acid
  MISC_FEATURE (45)..(45): X is absent or any amino acid
  MISC_FEATURE (46)..(46): X is absent or any amino acid
  MISC_FEATURE (47)..(47): X is absent or any amino acid
  MISC_FEATURE (48)..(48): X is absent or any amino acid
  MISC_FEATURE (50)..(54): X is any amino acid
  MISC_FEATURE (55)..(55): X is absent or any amino acid
  MISC_FEATURE (56)..(56): X is absent or any amino acid
  MISC_FEATURE (57)..(57): X is absent or any amino acid
  MISC_FEATURE (58)..(58): X is absent or any amino acid
  MISC_FEATURE (59)..(59): X is absent or any amino acid
  MISC_FEATURE (60)..(60): X is absent or any amino acid
  MISC_FEATURE (61)..(61): X is absent or any amino acid
  MISC_FEATURE (62)..(62): X is absent or any amino acid
  MISC_FEATURE (63)..(63): X is absent or any amino acid
  MISC_FEATURE (64)..(64): X is absent or any amino acid
  MISC_FEATURE (65)..(65): X is absent or any amino acid
  MISC_FEATURE (66)..(66): X is absent or any amino acid
  MISC_FEATURE (67)..(67): X is absent or any amino acid
  MISC_FEATURE (68)..(68): X is absent or any amino acid
  MISC_FEATURE (69)..(69): X is absent or any amino acid
  MISC_FEATURE (71)..(95): X is any amino acid
  MISC_FEATURE (88)..(113): X is any amino acid
  MISC_FEATURE (96)..(96): X is absent or any amino acid
  MISC_FEATURE (97)..(97): X is absent or any amino acid
  MISC_FEATURE (98)..(98): X is absent or any amino acid
  MISC_FEATURE (99)..(99): X is absent or any amino acid
  MISC_FEATURE (100)..(100): X is absent or any amino acid
  MISC_FEATURE (102)..(103): X is any amino acid
CXPXXXXXXXXXXXXXXXXXXXXXXXXXXXXXXXXXXXXXXXXXXXXXCXXXXXXXXXXXXXXXXXXXXWXXXXXXXXXXXXXXXXXXXXXXXXXXXXXXWXXHHP

SEQ ID NO: 107 - protein, 106 aa, Artificial Sequence
  HA sequence element consensus sequence element
  MISC_FEATURE (4)..(30): X= is any amino acid
  MISC_FEATURE (31)..(31): X= is absent or any amino acid
  MISC_FEATURE (32)..(32): X= is absent or any amino acid
  MISC_FEATURE (33)..(33): X= is absent or any amino acid
  MISC_FEATURE (34)..(34): X= is absent or any amino acid
  MISC_FEATURE (35)..(35): X= is absent or any amino acid
  MISC_FEATURE (36)..(36): X= is absent or any amino acid
  MISC_FEATURE (37)..(37): X= is absent or any amino acid
  MISC_FEATURE (38)..(38): X= is absent or any amino acid
  MISC_FEATURE (39)..(39): X= is absent or any amino acid
  MISC_FEATURE (40)..(40): X= is absent or any amino acid
  MISC_FEATURE (41)..(41): X= is absent or any amino acid
  MISC_FEATURE (42)..(42): X= is absent or any amino acid
  MISC_FEATURE (43)..(43): X= is absent or any amino acid
  MISC_FEATURE (44)..(44): X= is absent or any amino acid
  MISC_FEATURE (45)..(45): X= is absent or any amino acid
  MISC_FEATURE (47)..(47): X= Ala or Thr
  MISC_FEATURE (48)..(48): X= Ala or Ser
  MISC_FEATURE (50)..(54): X= is any amino acid
  MISC_FEATURE (55)..(55): X= is absent or any amino acid
  MISC_FEATURE (56)..(56): X= is absent or any amino acid
  MISC_FEATURE (57)..(57): X= is absent or any amino acid
  MISC_FEATURE (58)..(58): X= is absent or any amino acid
  MISC_FEATURE (59)..(59): X= is absent or any amino acid
  MISC_FEATURE (60)..(60): X= is absent or any amino acid
  MISC_FEATURE (61)..(61): X= is absent or any amino acid
  MISC_FEATURE (62)..(62): X= is absent or any amino acid
  MISC_FEATURE (63)..(63): X= is absent or any amino acid
  MISC_FEATURE (64)..(64): X= is absent or any amino acid
  MISC_FEATURE (65)..(65): X= is absent or any amino acid
  MISC_FEATURE (66)..(66): X= is absent or any amino acid
  MISC_FEATURE (67)..(67): X= is absent or any amino acid
  MISC_FEATURE (68)..(68): X= is absent or any amino acid
  MISC_FEATURE (69)..(69): X= is absent or any amino acid
  MISC_FEATURE (71)..(95): X= is any amino acid
  MISC_FEATURE (96)..(96): X= is absent or any amino acid
  MISC_FEATURE (97)..(97): X= is absent or any amino acid
  MISC_FEATURE (98)..(98): X= is absent or any amino acid
  MISC_FEATURE (99)..(99): X= is absent or any amino acid
  MISC_FEATURE (100)..(100): X= is absent or any amino acid
  MISC_FEATURE (102)..(103): X= is any amino acid
CYPXXXXXXXXXXXXXXXXXXXXXXXXXXXXXXXXXXXXXXXXXXTXXCXXXXXXXXXXXXXXXXXXXXWXXXXXXXXXXXXXXXXXXXXXXXXXXXXXXWXXHHP

SEQ ID NO: 108 - protein, 106 aa, Artificial Sequence; identical to SEQ ID NO: 107
  HA sequence element consensus sequence element
  MISC_FEATURE (4)..(30): X= is any amino acid
  MISC_FEATURE (31)..(31): X= is absent or any amino acid
  MISC_FEATURE (32)..(32): X= is absent or any amino acid
  MISC_FEATURE (33)..(33): X= is absent or any amino acid
  MISC_FEATURE (34)..(34): X= is absent or any amino acid
  MISC_FEATURE (35)..(35): X= is absent or any amino acid
  MISC_FEATURE (36)..(36): X= is absent or any amino acid
  MISC_FEATURE (37)..(37): X= is absent or any amino acid
  MISC_FEATURE (38)..(38): X= is absent or any amino acid
  MISC_FEATURE (39)..(39): X= is absent or any amino acid
  MISC_FEATURE (40)..(40): X= is absent or any amino acid
  MISC_FEATURE (41)..(41): X= is absent or any amino acid
  MISC_FEATURE (42)..(42): X= is absent or any amino acid
  MISC_FEATURE (43)..(43): X= is absent or any amino acid
  MISC_FEATURE (44)..(44): X= is absent or any amino acid
  MISC_FEATURE (45)..(45): X= is absent or any amino acid
  MISC_FEATURE (47)..(47): X= Ala or Thr
  MISC_FEATURE (48)..(48): X= Ala or Ser
  MISC_FEATURE (50)..(54): X= is any amino acid
  MISC_FEATURE (55)..(55): X= is absent or any amino acid
  MISC_FEATURE (56)..(56): X= is absent or any amino acid
  MISC_FEATURE (57)..(57): X= is absent or any amino acid
  MISC_FEATURE (58)..(58): X= is absent or any amino acid
  MISC_FEATURE (59)..(59): X= is absent or any amino acid
  MISC_FEATURE (60)..(60): X= is absent or any amino acid
  MISC_FEATURE (61)..(61): X= is absent or any amino acid
  MISC_FEATURE (62)..(62): X= is absent or any amino acid
  MISC_FEATURE (63)..(63): X= is absent or any amino acid
  MISC_FEATURE (64)..(64): X= is absent or any amino acid
  MISC_FEATURE (65)..(65): X= is absent or any amino acid
  MISC_FEATURE (66)..(66): X= is absent or any amino acid
  MISC_FEATURE (67)..(67): X= is absent or any amino acid
  MISC_FEATURE (68)..(68): X= is absent or any amino acid
  MISC_FEATURE (69)..(69): X= is absent or any amino acid
  MISC_FEATURE (71)..(71): X= Ile or Leu
  MISC_FEATURE (72)..(72): X=Thr or Val
  MISC_FEATURE (73)..(95): X= is any amino acid
  MISC_FEATURE (96)..(96): X= is absent or any amino acid
  MISC_FEATURE (97)..(97): X= is absent or any amino acid
  MISC_FEATURE (98)..(98): X= is absent or any amino acid
  MISC_FEATURE (99)..(99): X= is absent or any amino acid
  MISC_FEATURE (100)..(100): X= is absent or any amino acid
  MISC_FEATURE (102)..(103): X= is any amino acid

SEQ ID NO: 109 - protein, 10 aa, Artificial Sequence
  HA sequence element consensus sequence element
QLSSISSFEK

SEQ ID NO: 110 - protein, 106 aa, Artificial Sequence
  HA sequence element consensus sequence element
  MISC_FEATURE (4)..(30): X = is any amino acid
  MISC_FEATURE (31)..(31): X = is absent or any amino acid
  MISC_FEATURE (32)..(32): X = is absent or any amino acid
  MISC_FEATURE (33)..(33): X = is absent or any amino acid
  MISC_FEATURE (34)..(34): X = is absent or any amino acid
  MISC_FEATURE (35)..(35): X = is absent or any amino acid
  MISC_FEATURE (36)..(36): X = is absent or any amino acid
  MISC_FEATURE (37)..(37): X = is absent or any amino acid
  MISC_FEATURE (38)..(38): X = is absent or any amino acid
  MISC_FEATURE (39)..(39): X = is absent or any amino acid
  MISC_FEATURE (40)..(40): X = is absent or any amino acid
  MISC_FEATURE (41)..(41): X = is absent or any amino acid
  MISC_FEATURE (42)..(42): X = is absent or any amino acid
  MISC_FEATURE (43)..(43): X = is absent or any amino acid
  MISC_FEATURE (44)..(44): X = is absent or any amino acid
  MISC_FEATURE (45)..(45): X = is absent or any amino acid
  MISC_FEATURE (47)..(47): X = Ser or Asn
  MISC_FEATURE (48)..(48): X = Ala or Ser
  MISC_FEATURE (50)..(54): X = is any amino acid
  MISC_FEATURE (55)..(55): X = is absent or any amino acid
  MISC_FEATURE (56)..(56): X = is absent or any amino acid
  MISC_FEATURE (57)..(57): X = is absent or any amino acid
  MISC_FEATURE (58)..(58): X = is absent or any amino acid
  MISC_FEATURE (59)..(59): X = is absent or any amino acid
  MISC_FEATURE (60)..(60): X = is absent or any amino acid
  MISC_FEATURE (61)..(61): X = is absent or any amino acid
  MISC_FEATURE (62)..(62): X = is absent or any amino acid
  MISC_FEATURE (63)..(63): X = is absent or any amino acid
  MISC_FEATURE (64)..(64): X = is absent or any amino acid
  MISC_FEATURE (65)..(65): X = is absent or any amino acid
  MISC_FEATURE (66)..(66): X = is absent or any amino acid
  MISC_FEATURE (67)..(67): X = is absent or any amino acid
  MISC_FEATURE (68)..(68): X = is absent or any amino acid
  MISC_FEATURE (69)..(69): X = is absent or any amino acid
  MISC_FEATURE (71)..(95): X = is any amino acid
  MISC_FEATURE (96)..(96): X = is absent or any amino acid
  MISC_FEATURE (97)..(97): X = is absent or any amino acid
  MISC_FEATURE (98)..(98): X = is absent or any amino acid
  MISC_FEATURE (99)..(99): X = is absent or any amino acid
  MISC_FEATURE (100)..(100): X = is absent or any amino acid
  MISC_FEATURE (102)..(103): X = is any amino acid
CYPXXXXXXXXXXXXXXXXXXXXXXXXXXXXXXXXXXXXXXXXXXSXXCXXXXXXXXXXXXXXXXXXXXWXXXXXXXXXXXXXXXXXXXXXXXXXXXXXXWXXHHP

SEQ ID NO: 111 - protein, 106 aa, Artificial Sequence
  HA sequence element consensus sequence element
  MISC_FEATURE (4)..(30): X = is any amino acid
  MISC_FEATURE (31)..(31): X = is absent or any amino acid
  MISC_FEATURE (32)..(32): X = is absent or any amino acid
  MISC_FEATURE (33)..(33): X = is absent or any amino acid
  MISC_FEATURE (34)..(34): X = is absent or any amino acid
  MISC_FEATURE (35)..(35): X = is absent or any amino acid
  MISC_FEATURE (36)..(36): X = is absent or any amino acid
  MISC_FEATURE (37)..(37): X = is absent or any amino acid
  MISC_FEATURE (38)..(38): X = is absent or any amino acid
  MISC_FEATURE (39)..(39): X = is absent or any amino acid
  MISC_FEATURE (40)..(40): X = is absent or any amino acid
  MISC_FEATURE (41)..(41): X = is absent or any amino acid
  MISC_FEATURE (42)..(42): X = is absent or any amino acid
  MISC_FEATURE (43)..(43): X = is absent or any amino acid
  MISC_FEATURE (44)..(44): X = is absent or any amino acid
  MISC_FEATURE (45)..(45): X = is absent or any amino acid
  MISC_FEATURE (46)..(46): X = Ser or Asn
  MISC_FEATURE (47)..(47): X = Ala or Ser
  misc_feature (48)..(48): Xaa can be any naturally occurring amino acid
  MISC_FEATURE (50)..(54): X = is any amino acid
  MISC_FEATURE (55)..(55): X = is absent or any amino acid
  MISC_FEATURE (56)..(56): X = is absent or any amino acid
  MISC_FEATURE (57)..(57): X = is absent or any amino acid
  MISC_FEATURE (58)..(58): X = is absent or any amino acid
  MISC_FEATURE (59)..(59): X = is absent or any amino acid
  MISC_FEATURE (60)..(60): X = is absent or any amino acid
  MISC_FEATURE (61)..(61): X = is absent or any amino acid
  MISC_FEATURE (62)..(62): X = is absent or any amino acid
  MISC_FEATURE (63)..(63): X = is absent or any amino acid
  MISC_FEATURE (64)..(64): X = is absent or any amino acid
  MISC_FEATURE (65)..(65): X = is absent or any amino acid
  MISC_FEATURE (66)..(66): X = is absent or any amino acid
  MISC_FEATURE (67)..(67): X = is absent or any amino acid
  MISC_FEATURE (68)..(68): X = is absent or any amino acid
  MISC_FEATURE (69)..(69): X = is absent or any amino acid
  MISC_FEATURE (72)..(72): X = Thr or His
  MISC_FEATURE (73)..(95)
  misc_feature (96)..(96): X= is absent or any amino acid
  misc_feature (97)..(97): X= is absent or any amino acid
  misc_feature (98)..(98): X= is absent or any amino acid
  misc_feature (99)..(99): X= is absent or any amino acid
  misc_feature (100)..(100): X= is absent or any amino acid
  MISC_FEATURE (102)..(103): X = is any amino acid
CYPXXXXXXXXXXXXXXXXXXXXXXXXXXXXXXXXXXXXXXXXXXSXXCXXXXXXXXXXXXXXXXXXXXWLXXXXXXXXXXXXXXXXXXXXXXXXXXXXXWXXHHP

SEQ ID NO: 112 - protein, 10 aa, Artificial Sequence
  HA sequence element consensus sequence element
  MISC_FEATURE (1)..(1): X = Leu or Ile
  MISC_FEATURE (2)..(2): X = Val or Ile
XXASSGTLEF

SEQ ID NO: 113 - protein, 106 aa, Artificial Sequence
  HA sequence element consensus sequence element
  MISC_FEATURE (4)..(30): X = is any amino acid
  MISC_FEATURE (31)..(31): X = is absent or any amino acid
  MISC_FEATURE (32)..(32): X = is absent or any amino acid
  MISC_FEATURE (33)..(33): X = is absent or any amino acid
  MISC_FEATURE (34)..(34): X = is absent or any amino acid
  MISC_FEATURE (35)..(35): X = is absent or any amino acid
  MISC_FEATURE (36)..(36): X = is absent or any amino acid
  MISC_FEATURE (37)..(37): X = is absent or any amino acid
  MISC_FEATURE (38)..(38): X = is absent or any amino acid
  MISC_FEATURE (39)..(39): X = is absent or any amino acid
  MISC_FEATURE (40)..(40): X = is absent or any amino acid
  misc_feature (41)..(41): Xaa can be any naturally occurring amino acid
  MISC_FEATURE (42)..(42): X = is absent or any amino acid
  MISC_FEATURE (43)..(43): X = is absent or any amino acid
  MISC_FEATURE (44)..(44): X = is absent or any amino acid
  MISC_FEATURE (45)..(45): X = is absent or any amino acid
  MISC_FEATURE (50)..(54): X = is any amino acid
  MISC_FEATURE (55)..(55): X = is absent or any amino acid
  MISC_FEATURE (56)..(56): X = is absent or any amino acid
  MISC_FEATURE (57)..(57): X = is absent or any amino acid
  MISC_FEATURE (58)..(58): X = is absent or any amino acid
  MISC_FEATURE (59)..(59): X = is absent or any amino acid
  MISC_FEATURE (60)..(60): X = is absent or any amino acid
  MISC_FEATURE (61)..(61): X = is absent or any amino acid
  MISC_FEATURE (62)..(62): X = is absent or any amino acid
  MISC_FEATURE (63)..(63): X = is absent or any amino acid
  MISC_FEATURE (64)..(64): X = is absent or any amino acid
  MISC_FEATURE (65)..(65): X = is absent or any amino acid
  MISC_FEATURE (66)..(66): X = is absent or any amino acid
  MISC_FEATURE (67)..(67): X = is absent or any amino acid
  MISC_FEATURE (68)..(68): X = is absent or any amino acid
  MISC_FEATURE (69)..(69): X = is absent or any amino acid
  MISC_FEATURE (71)..(95): X = is any amino acid
  MISC_FEATURE (96)..(96): X = is absent or any amino acid
  MISC_FEATURE (97)..(97): X = is absent or any amino acid
  MISC_FEATURE (98)..(98): X = is absent or any amino acid
  MISC_FEATURE (99)..(99): X = is absent or any amino acid
  MISC_FEATURE (100)..(100): X = is absent or any amino acid
  MISC_FEATURE (102)..(103): X =is any amino acid
CYPXXXXXXXXXXXXXXXXXXXXXXXXXXXXXXXXXXXXXXXXXXSSACXXXXXXXXXXXXXXXXXXXXWXXXXXXXXXXXXXXXXXXXXXXXXXXXXXXWXXHHP

SEQ ID NO: 114 - protein, 106 aa, Artificial Sequence
  HA sequence element consensus sequence element
  MISC_FEATURE (4)..(30): X = is any amino acid
  MISC_FEATURE (31)..(31): X = is absent or any amino acid
  MISC_FEATURE (32)..(32): X = is absent or any amino acid
  MISC_FEATURE (33)..(33): X = is absent or any amino acid
  MISC_FEATURE (34)..(34): X = is absent or any amino acid
  MISC_FEATURE (35)..(35): X = is absent or any amino acid
  MISC_FEATURE (36)..(36): X = is absent or any amino acid
  MISC_FEATURE (37)..(37): X = is absent or any amino acid
  MISC_FEATURE (38)..(38): X = is absent or any amino acid
  MISC_FEATURE (39)..(39): X = is absent or any amino acid
  MISC_FEATURE (40)..(40): X = is absent or any amino acid
  MISC_FEATURE (41)..(41): X = is absent or any amino acid
  MISC_FEATURE (42)..(42): X = is absent or any amino acid
  MISC_FEATURE (43)..(43): X = is absent or any amino acid
  MISC_FEATURE (44)..(44): X = is absent or any amino acid
  MISC_FEATURE (45)..(45): X = is absent or any amino acid
  MISC_FEATURE (50)..(54): X = is any amino acid
  MISC_FEATURE (55)..(55): X = is absent or any amino acid
  MISC_FEATURE (56)..(56): X = is absent or any amino acid
  MISC_FEATURE (57)..(57): X = is absent or any amino acid
  MISC_FEATURE (58)..(58): X = is absent or any amino acid
  MISC_FEATURE (59)..(59): X = is absent or any amino acid
  MISC_FEATURE (60)..(60): X = is absent or any amino acid
  MISC_FEATURE (61)..(61): X = is absent or any amino acid
  MISC_FEATURE (62)..(62): X = is absent or any amino acid
  MISC_FEATURE (63)..(63): X = is absent or any amino acid
  MISC_FEATURE (64)..(64): X = is absent or any amino acid
  MISC_FEATURE (65)..(65): X = is absent or any amino acid
  MISC_FEATURE (66)..(66): X = is absent or any amino acid
  MISC_FEATURE (67)..(67): X = is absent or any amino acid
  MISC_FEATURE (68)..(68): X = is absent or any amino acid
  MISC_FEATURE (69)..(69): X = is absent or any amino acid
  MISC_FEATURE (73)..(95): X = is any amino acid
  MISC_FEATURE (96)..(96): X = is absent or any amino acid
  MISC_FEATURE (97)..(97): X = is absent or any amino acid
  MISC_FEATURE (98)..(98): X = is absent or any amino acid
  MISC_FEATURE (99)..(99): X = is absent or any amino acid
  MISC_FEATURE (100)..(100): X = is absent or any amino acid
  MISC_FEATURE (102)..(103): X = is any amino acid
CYPXXXXXXXXXXXXXXXXXXXXXXXXXXXXXXXXXXXXXXXXXXSSACXXXXXXXXXXXXXXXXXXXXWLIXXXXXXXXXXXXXXXXXXXXXXXXXXXXWXXHHP

SEQ ID NO: 115 - protein, 8 aa, Artificial Sequence
  HA sequence element consensus sequence element
  misc_feature (6)..(7): X= any amino acid
  MISC_FEATURE (8)..(8): X = Lys or Arg
NDAAEXXX

SEQ ID NO: 116 - protein, 16 aa, Artificial Sequence
  HA sequence element consensus sequence element
  misc_feature (8)..(8): X= any amino acid
  misc_feature (10)..(11): X= any amino acid
YEELKHLXSXXNHFEK

SEQ ID NO: 117 - protein, 8 aa, Artificial Sequence
  HA sequence element consensus sequence element
GAIAGFIE

SEQ ID NO: 118 - protein, 23 aa, Artificial Sequence
  HA sequence element consensus sequence element
  MISC_FEATURE (2)..(5): X = is any amino acid
  MISC_FEATURE (6)..(15): X = is absent or any amino acid
PXXXXXXXXXXXXXXGAIAGFIE

SEQ ID NO: 119 - protein, 17 aa, Artificial Sequence
  HA sequence element consensus sequence element
  misc_feature (3)..(3): X= any amino acid
  MISC_FEATURE (7)..(9): X = is any amino acid
PSXQSRXXXGAIAGFIE

SEQ ID NO: 120 - protein, 17 aa, Artificial Sequence
  HA sequence element consensus sequence element
  MISC_FEATURE (2)..(2)
  MISC_FEATURE (4)..(4)
  MISC_FEATURE (7)..(9): X = any amino acid
PXKXTRXXXGAIAGFIE

SEQ ID NO: 121 - protein, 21 aa, Artificial Sequence
  HA sequence element consensus sequence element
  MISC_FEATURE (4)..(6): X= any amino acid
  MISC_FEATURE (8)..(9): X= any amino acid
  MISC_FEATURE (11)..(13): X = is any amino acid
PQRXXXRXXRXXXGAIAGFIE

SEQ ID NO: 122 - protein, 567 aa, Artificial Sequence
  NCBI influenza virus sequence
  misc_feature (203)..(203): Xaa can be any naturally occurring amino acid
  misc_feature (238)..(238): Xaa can be any naturally occurring amino acid
MEKIVLLLAIVSLVKSDQICIGYHANNSTEQVDTIMEKNVTVTHAQDILEKTHNGKLCNLDGVKPLILRDCSVAGWLLGNPMCDEFLNVPEWSYIVEKINPANDLCYPGNFNDYEELKHLLSRINHFEKIQIIPKNSWSDHEASGVSSACPYQGRSSFFRNVVWLTKRDNAYPTIKRSYNNTNQEDLLVLWGIHHPNDAAEQXRLYQNPTTYISVGTSTLNQRLVPKIATRSKVNGQXGRMEFFWTILKSNDAINFESNGNFIAPENAYKIVKKGDSTIMKSELEYGNCNTKCQTPIGAINSSMPFHNIHPLTIGECPKYVKSNRLVLATGLRNSPQGERRRKKRGLFGAIAGFIEGGWQGMVDGWYGYHHSNEQGSGYAADKESTQKAIDGVTNKVNSIIDKMNTQFEAVGREFNNLERRIENLNKKMEDGFLDVWTYNAELLVLMENERTLDFHDSNVKNLYDKVRLQLRDNAKELGNGCFEFYHRCDNECMESVRNGTYDYPQYSEEARLKREEISGVKLESIGTYQILSIYSTVASSLALAIMVAGLSLWMCSNGSLQCRICI

SEQ ID NO: 123 - protein, 567 aa, Artificial Sequence
  NCBI influenza virus sequence
MEKIVLLLAIVSLVKSDQICIGYHANNSTEQVDTIMEKNVTVTHAQDILEKTHNGKLCNLDGVKPLILRDCSVAGWLLGNPMCDEFLNVPEWSYIVEKINPANDLCYPGNFNDYEELKHLLSRINHFEKIQIIPKNSWSDHEASGVSSACPYQGRSSFFRNVVWLTKKDNAYPTIKRSYNNTNQEDLLVLWGIHHPNDAAEQTRLYQNPTTYISVGTSTLNQRLVPKIATRSKVNGQSGRMEFFWTILKSNDAINFESNGNFIAPENAYKIVKKGDSTIMKSELEYGNCNTKCQTPIGAINSSMPFHNIHPLTIGECPKYVKSNRLVLATGLRNSPQGERRRKKRGLFGAIAGFIEGGWQGMVDGWYGYHHSNEQGSGYAADKESTQKAIDGVTNKVNSIIDKMNTQFEAVGREFNNLERRIENLNKKMEDGFLDVWTYNAELLVLMENERTLDFHDSNVKNLYDKVRLQLRDNAKELGNGCFEFYHRCDNECMESVRNGTYDYPQYSEEARLKREEISGVKLESIGTYQILSIYSTVASSLALAIMVAGLFLWMCSNGSLQCRICI

SEQ ID NO: 124 - protein, 567 aa, Artificial Sequence
  NCBI influenza virus sequence
MEKIVLLLAIVSLVKSDQICIGYHANNSTEQVDTIMEKNVTVTHAQDILEKTHNGKLCNLNGVKPLILRDCSVAGWLLGNPMCDEFLNVPEWSYIVEKINPANDLCYPGNFNDYEELKHLLSRINHFEKIQIIPKNSWSDHEASGVSSACPYQGRSSFFRNVVWLTKKDNAYPTIKRSYNNTNQEDLLVLWGIHHPNDAAEQTRLYQNPTTYISVGTSTLNQRLVPKIAARSKVNGQSGRMEFFWTILKSNDAINFESNGNFIAPENAYKIVKKGDSTIMKSELEYGNCNTKCQTPIGAINSSMPFHNIHPLTIGECPKYVKSNRLVLATGLRNSPQGERRRKKRGLFGAIAGFIEGGWQGMVDGWYGYHHSNEQGSGYAADKESTQKAIDGVTNKVNSIIDKMNTQFEAVGREFNNLERRIENLNKKMEDGFLDVWTYNAELLVLMENERTLDFHDSNVKNLYDKVRLQLRDNAKELGNGCFEFYHRCDNECMESVRNGTYDYPQYSEEARLKREEISGVKLESIGTYQILSIYSTVASSLALAIMVAGLFLWMCSNGSLQCRICI

SEQ ID NO: 125 - protein, 567 aa, Artificial Sequence
  NCBI influenza virus sequence
  misc_feature (197)..(197): Xaa can be any naturally occurring amino acid
MEKIVLLLAIVSLVKSDQICIGYHANNSTEQVDTIMEKNVTVTHAQDILEKTHNGKLCNLDGVKPLILRDCSVAGWLLGNPMCDEFLNVPEWSYIVEKINPANDLCYPGNFNDYEELKHLLSRINHFEKIQIIPKNSWSDHEASGVSSACPYQGRPSFFRNVVWLTKKDNAYPTIKRSYNNTNQEDLLVLWGIHHPXDAAEQTRLYQNPTTYISVGTSTLNQRLVPKIATRSKVNGQSGRMEFFWTILKSNDAINFESNGNFIAPENAYKIVKKGDSTIMKSELEYGNCNTKCQTPIGAINSSMPFHNIHPLTIGECPKYVKSNRLVLATGLRNSPQGERRRKKRGLFGAIAGFIEGGWQGMVDGWYGYHHSNEQGSGYAADKESTQKAIDGVTNKVNSIIDKMNTQFEAVGREFNNLERRIGNLNKKMEDGFLDVWTYNAELLVLMENERTLDFHDSNVKNLYDKVRLQLRDNAKELGNGCFEFYHRCDNECMESVRNGTYDYPQYSEEARLKREEISGVKMESIGTYQILSIYSTVASSLALAIMVAGLFLWMCSNGSLQCRICI

SEQ ID NO: 126 - protein, 567 aa, Artificial Sequence
  NCBI influenza virus sequence
MEKIVLLLAIVSIVKSDQICIGYHANNSTEQVDTIMEKNVTVTHAQDILEKTHNGKLCNLDGVKPLILRDCSVAGWLLGNPMCDEFLNVPEWSYIVEKINPANDLCYPGNFNDYEELKHLLSRINHFEKIQIIPKNSWSDHEASGVSSACPYQGRSSFFRNVVWLTKKNNAYPTIKRSYNNTNQEDLLVLWGIHHPNDAAEQTRLYQNPTTYISVGTSTLNQRLVPKIATRSKVNGQSGRMEFFWTILKSNDAINFESNGNFIAPENAYKIVKKGDSTIMKSELEYGNCNTKCQTPIGAINSSMPFHNIHPLTIGECPKYVKSNRLVLATGLRNSPQGERRRKKRGLFGAIAGFIEGGWQGMVDGWYGYHHSNEQGSGYAADKESTQKAIDGVTNKVNSIIDKMNTQFEAVGREFNNLERRIENLNKKMEDGFLDVWTYNAELLVLMENERTLDFHDSNVKNLYDKVRLQLRDNAKELGNGCFEFYHRCDNECMESVRNGTYDYPQYSEEARLKREEISGVKLESIGTYQILSIYSTVASSLALAIMVAGLFLWMCSNGSLQCRICI

SEQ ID NO: 127 - protein, 567 aa, Artificial Sequence
  NCBI influenza virus sequence
MEKIVLLLAIVSLVKSDQICIGYHANNSTEQVDTIMEKNVTVTHAQDILEKTHNGKLCNLDGVKPLILRDCSVAGWLLGNPMCDEFLNVPEWSYIVEKINPANDLCYPGNFNDYEELKHLLSRINHFEKIQIIPKNSWSDHEASGVSSACPYQGRSSFFRNVVWLTKKNNAYPTIKRSYNNTNQEDLLVLWGIHHPNDAAEQTRLYQNPTTYISVGTSTLNQRLVPKITTRSKVNGQSGRMEFFWTILKSNDAINFESNGNFIAPENAYKIVKKGDSTIMKSELEYGNCNTKCQTPIGAINSSMPFHNIHPLTIGECPKYVKSNRLVLATGLRNSPQGERRRKKRGLFGAIAGFIEGGWQGMVDGWYGYHHSNEQGSGYAADKESTQKAIDGVTNKVNSIIDKMNTQFEAVGREFNNLERRIENLNKKMEDGFLDVWTYNAELLVLMENERTLDFHDSNVKNLYDKVRLQLRDNAKELGNGCFEFYHRCDNECMESVRNGTYDYPQYSEEARLKREEISGVKLESIGTYQILSIYSTVASSLALAIMVAGLFLWMCSNGSLQCRICI

SEQ ID NO: 128 - protein, 567 aa, Artificial Sequence
  NCBI influenza virus sequence
MEKIVLLLAIVSLVKSDQICIGYHANNSTEQVDTIMEKNVTVTHAQDILEKTHNGKLCNLDGVKPLILRDCSVAGWLLGNPMCDEFLNVPEWSYIVEKINPANDLCYPGNFNDYEELKHLLSRINHFEKIQIIPKNSWSDHEASGVSSACPYQGRSSFFRNVVWLTKKDNAYPTIKRSYNNTNQEDLLVLWGIHHPNDAAEQTRLYQNPTTYISVGTSTLNQRLIPKIATRSKVNGQSGRMEFFWTILKSNDAINFESNGNFIAPENAYKIVKKGDSTIMKSELEYGNCNTKCQTPIGAINSSMPFHNIHPLTIGECPKYVKSNRLVLATGLRNSPQGERRRKKRGLFGAIAGFIEGGWQGMVDGWYGYHHSNEQGSGYAADKESTQKAIDGVTNKVNSIIDKMNTQFEAVGREFNNLERRIENLNKKMEDGFLDVWTYNAELLVLMENERTLDFHDSNVKNLYDKVRLQLRDNAKELGNGCFEFYHRCDNECMESVRNGTYDYPQYSEEARLKREEISGVKLESIGTYQILSIYSTVASSLALAIMVAGLFLWMCSNGSLQCRICI

SEQ ID NO: 129 - protein, 567 aa, Artificial Sequence; identical to SEQ ID NO: 123
  NCBI influenza virus sequence

SEQ ID NO: 130 - protein, 567 aa, Artificial Sequence
  NCBI influenza virus sequence
MEKIVLLLAIVSLVKSDQICIGYHANNSTEQVDTIMEKNVTVTHAQDILEKTHNGKLCNLDGVKPLILRDCSVAGWLLGNPMCDEFLNVPEWSYIVEKINPANDLCYPGNFNDYEELKHLLSRINHFEKIQIIPKNSWSDHEASGMSSACPYQGRSSFFRNVVWLTKKDNAYPTIKRSYNNTNQEDLLVLWGIHHPNDAAEQTRLYQNPTTYISVGTSTLNQRLVPKIATRSKVNGQSGRMEFFWTILKSNDAINFESNGNFIAPENAYKIVKKGDSTIMKSELEYGNCNTKCQTPIGAINSSMPFHNIHPLTIGECPKYVKSNRLVLATGLRNSPQGERRRKKRGLFGAIAGFIEGGWQGMVDGWYGYHHSNEQGSGYAADKESTQKAIDGVTNKVNSIIDKMNTQFEAVGREFNNLERRIENLNKKMEDGFLDVWTYNAELLVLMENERTLDFHDSNVKNLYDKVRLQLRDNAKELGNGCFEFYHRCDNECMESVRNGTYDYPQYSEEARLKREEISGVKLESIGTYQILSIYSTVASSLALAIMVAGLFLWMCSNGSLQCRICI

SEQ ID NO: 131 - protein, 567 aa, Artificial Sequence
  NCBI influenza virus sequence
MEKIVLLLAIVSLVKSDQICIGYHANNSTEQVDTIMEKNVTVTHAQDILEKTHNGKLCNLDGVKPLILRDCSVAGWLLGNPMCDEFLNVPEWSYIVEKINPANDLCYPGNFNDYEELKHLLSRINHFEKIQIIPKNSWSDHEASGVSSACPYQGRSSFFRNVVWLTKKDNAYPTIKRSYNNTNQEDLLVLWGIHHPNDAAEQTRLYQNPTTYISVGTSTLNQRLVPKIATRSKVNGQSGRMEFFWTILKSNDAINFESNGNFIAPENAYKIVKKGDSTIMKSELEYGNCNTKCQTPIGAINSSMPFHNIHPLTIGECPKYVKSNRLVLATGLRNSPQGERRRKKRGLFGAIAGFIEGGWQGMVDGWYGYHHSNEQGSGYAADKESTQKAIDGVTNKVNSIIDKMNTQFEAVGREFNNLESRIENLNKKMEDGFLDVWTYNAELLVLMENERTLDFHDSNVKNLYDKVRLQLRDNAKELGNGCFEFYHRCDNECMESVRNGTYDYPQYSEEARLKREEISGVKLESIGTYQILSIYSTVASSLALAIMVAGLFLWMCSNGSLQCRICI

SEQ ID NO: 132 - protein, 567 aa, Artificial Sequence
  NCBI influenza virus sequence
MEKIVLLLAIVSLVKSDQICIGYHANNSTEQVDTIMEKNVTVTHAQDILEKTHNGKLCNLDGVKPLILRDCSVAGWLLGNPMCDEFLNVPEWSYIVEKINPANDLCYPGNFNDYEELKHLLSRINHFEKIQIIPKNSWSDHEASGVSSACPYQGRSSFFRNVVWLTKKNNAYPTIKRSYNNTNQEDLLVLWGIHHPNDAEEQTRLYQNPTTYISVGTSTLNQRLVPKIATRSKVNGQSGRMEFFWTILKSNDAINFESNGNFIAPENAYKIVKKGDSTIMKSELEYGNCNTKCQTPIGAINSSMPFHNIHPLTIGECPKYVKSNRLVLATGLRNSPQGERRRKKRGLFGAIAGFIEGGWQGMVDGWYGYHHSNEQGSGYAADKESTQKAIDGVTNKVNSIIDKMNTQFEAVGREFNALERRIENLNKKMEDGFLDVWTYNAELLVLMENERTLDFHDSNVKNLYDKVRLQLRDNAKELGNGCFEFYHRCDNECMESVRNGTYDYPQYSEEARLKREEISGVKLESIGTYQILSIYSTVASSLALAIMVAGLFLWMCSNGSLQCRICI

SEQ ID NO: 133 - protein, 567 aa, Artificial Sequence
  NCBI influenza virus sequence
MEKIVLLLAIVSLVKSDQICIGYHANNSTEQVDTIMEKNVTVTHAQDILEKTHNGKLCNLDGVKPLILRDCSVAGWLLGNPMCDEFLNVPEWSYIVEKINPANDLCYPGNFNDYEELKHLLSRINHFEKIQIIPKNSWSDHEASGVSSACPYQGRSSFFRNVVWLTKKDNAYPTIKRSYNNTNQEDLLVLWGIHHPNDAAEQTRLYQNPTTYISVGTSTLNQRLIPKIATRSKVNGQSGRMEFFWTILKPNDAINFESNGNFIAPENAYKIVKKGDSTIMKSELEYGNCNTKCQTPIGAINSSMPFHNIHPLTIGECPKYVKSNRLVLATGLRNSPQGERRRKKRGLFGAIAGFIEGGWQGMVDGWYGYHHSNEQGSGYAADKESTQKAIDGVTNKVNSIIDKMNTQFEAVGREFNNLERRIENLNKKMEDGFLDVWTYNAELLVLMENERTLDFHDSNVKNLYDKVRLQLRDNAKELGNGCFEFYHRCDNECMESVRNGTYDYPQYSEEARLKREEISGVKLESIGTYQILSIYSTVASSLALAIMVAGLFLWMCSNGSLQCRICI

SEQ ID NO: 134 - protein, 567 aa, Artificial Sequence
  NCBI influenza virus sequence
MEKIVLLLAIVSLVKSDQICIGYHANNSTEQVDTIMEKNVTVTHAQDILEKTHNGKLCNLDGVKPLILRDCSVAGWLLGNPMCDEFLNVPEWSYIVEKINPANDLCYPGNFNDYEELKHLLSRINHFEKIQIIPKNSWSDHEASGVSSACPYQGRSSFFRNVVWLTKKDNAYPTIKRSYNNTNQEDLLVLWGIHHPNDAAEQTRLYQNPTTYISVGTSTLNQRLVPKIATRSKVNGQNGRMEFFWTILKSNDAINFESNGNFIAPENAYKIVKKGDSTIMKSELEYGNCNTKCQTPIGAINSSMPFHNIHPLTIGECPKYVKSNRLVLATGLRNSPQGERRRKKRGLFGAIAGFIEGGWQGMVDGWYGYHHSNEQGSGYAADKESTQKAIDGVTNKVNSIIDKMNTQFEAVGREFNNLERRIENLNKKMEDGFLDVWTYNAELLVLMENERTLDFHDSNVKNLYDKVRLQLRDNAKELGNGCFEFYHRCDNECMESVRNGTYDYPHYSEEARLKREEISGVKLESIGTYQILSIYSTVASSLALAIMVAGLFLWMCSNGSLQCRICI

SEQ ID NO: 135 - protein, 567 aa, Artificial Sequence
  NCBI influenza virus sequence
MEKIVLLLAIVSLVKSDQICIGYHANNSTEQVDTIMEKNVTVTHAQDILEKTHNGKLCNLDGVKPLILRDCSVAGWLLGNPMCDEFLNVPEWSYIVEKINPANDLCYPGNFNDYEELKHLLSRINHFEKIQIIPKNSWSDHEASGVSSACPYQGRSSFFRNVVWLTKKDNAYPTIKRSYNNTNQEDLLVLWGIHHPNDAAEQTRLYQNPTTYISVGTSTLNQRLVPKIATRSKVNGQSGRMEFFWTILKSNDAINFESNGNFIAPENAYKIVKKGDSTIMKSELEYGNCNTKCQTPIGAINSSMPFHNIHPLTIGECPKYVKSNRLVLATGLRNSPQGERRRKKRGLFGAIAGFIEGGWQGMVDGWYGYHHSNEQGSGYAADKESTQKAIDGVTNKVNSIIDKMNTQFEAVGREFNNLERRIENLNKKMEDGFLDVWTYNAELLVLMENERTLDFHDSNVKNLYDKVRLQLRDNAKELGNGCFEFYHRCDNECMESVRNGTYDYPHYSEEARLKREEISGVKLESIGTYQILSIYSTVASSLALAIMVAGLFLWMCSNGSLQCRICI

SEQ ID NO: 136 - protein, 567 aa, Artificial Sequence
  NCBI influenza virus sequence
  misc_feature (320)..(320): Xaa can be any naturally occurring amino acid
MEKIVLLLAIVSLVKSDQICIGYHANNSTEQVDTIMEKNVTVTHAQDILEKTHNGKLCNLDGVKPLILRDCSVAGWLLGNPMCDEFLNVPEWSYIVEKINPANDLCYPGNFNDYEELKHLLSRINHFEKIQIIPKNSWSDHEASGVSSACPYQGRSSFFRNVVWLTKKDNAYPTIKRSYNNTNQEDLLVLWGIHHPNDAAEQTRLYQNPTTYISVGTSTLNQRLVPKIATRSKVNGQSGRMEFFWTILKSNDAINFESNGNFIAPENAYKIVKKGDSTIMKSELEYGNCNTKCQTPIGAINSSMPFHNIHPLTIGECPKXVKSNRLVLATGLRNSPQGERRRKKRGLFGAIAGFIEGGWQGMVDGWYGYHHSNEQGSGYAADKESTQKAIDGVTNKVNSIIDKMNTQFEAVGREFNNLERRIENLNKKMEDGFLDVWTYNAELLVLMENERTLDFHDSNVKNLYDKVRLQLRDNAKELGNGCFEFYHRCDNECMESVRNGTYDYPQYSEEARLKREEISGVKLESIGTYQILSIYSTVASSLALAIMMAGLFLWMCSNGSLQCRICI

SEQ ID NO: 137 - protein, 567 aa, Artificial Sequence; identical to SEQ ID NO: 123
  NCBI influenza virus sequence

SEQ ID NO: 138 - protein, 567 aa, Artificial Sequence
  NCBI influenza virus sequence
MEKIVLLLAIVSLVKSDQICIGYHANNSTEQVDTIMEKNVTVTHAQDILEKTHNGKLCNLDGVKPLILRDCSVAGWLLGNPMCDEFLNVPEWSYIVEKINPANDLCYPGNFNDYEELKHLLSRINHFEKIQIIPKNSWSDHEASGVSSACPYQGRSSFFRNVVWLTKKNNAYPTIKRSYNNTNQEDLLVLWGIHHPNDATEQTRLYQNPTTYISVGTSTLNQRLIPKIATRSKVNGQSGRMEFFWTILKSNDAINFESNGNFIAPENAYKIVKKGDSTIMKSELEYGNCNTKCQTPIGAINSSMPFHNIHPLTIGECPKYVKSNRLVLATGLRNSPQEGRRRKKRGLFGAIAGFIEGGWQGMVDGWYGYHHSNEQGSGYAADKESTQKAIDGVTNKVNSIIDKMNTQFEAVGREFNNLERRIENLNKKMEDGFLDVWTYNAELLVLMENERTLDFHDSNVKNLYDKVRLQLRDNAKELGNGCFEFYHRCDNECMESVRNGTYDYPQYSEEARLKREEISGVKLESIGTYQILSIYSTVASSLALAIMVAGLFLWMCSNGSLQCRICI

SEQ ID NO: 139 - protein, 567 aa, Artificial Sequence; identical to SEQ ID NO: 132
  NCBI influenza virus sequence

SEQ ID NO: 140 - protein, 567 aa, Artificial Sequence
  NCBI influenza virus sequence
MEKIVLLLAIVSLVKSDQICIGYHANNSTEQVDTIMEKNVTVTHAQDILEKTHNGKLCNLDGVKPLILRDCSVAGWLLGNPMCDEFLNVPEWSYIVEKINPANDLCYPGSFNDYEELKHLLSRINHFEKIQIIPKNSWSDHEASGVSSACPYQGRSSFFRNVVWLTKKDNAYPTIKRSYNNTNQEDLLVLWGIHHPNDAAEQTRLYQNPTTYISVGTSTLNQRLVPKIATRSKVNGQSGRMEFFWTILKPNDAINFESNGNFIAPENAYKIVKKGDSTIMKSELEYGNCNTKCQTPIGAINSSMPFHNIHPLTIGECPKYVKSNRLILATGLRNSPQGERRRKKRGLFGAIAGFIEGGWQGMVDGWYGYHHSNEQGSGYAADKESTQKAIDGVTNKVNSIIDKMNTQFEAVGREFNNLERRIENLNKKMEDGFLDVWTYNAELLVLMENERTLDFHDSNVKNLYDKVRLQLRDNAKELGNGCFEFYHRCDNECMESVRNGTYDYPQYSEEARLKREEISGVKLESIGTYQILSIYSTVASSLALAIMVAGLFLWMCSNGSLQCRICI

SEQ ID NO: 141 - protein, 567 aa, Artificial Sequence; identical to SEQ ID NO: 123
  NCBI influenza virus sequence

SEQ ID NO: 142 - protein, 567 aa, Artificial Sequence
  NCBI influenza virus sequence
MEKIVLLLAIVSLVKSDQICIGYHANNSTEQVDTIMEKNVTVTHAQDILEKTHNGKLCNLDGVKPLILRDCSVAGWLLGNPMCDEFLNVPEWSYIVEKINPANDLCYPGNFNDYEELKHLLSRINHFEKIQIIPKNSWSDHEASGVSSSCPYQGRSSFFRNVVWLTKKDNAYPTIKRSYNNTNQEDLLVLWGIHHPNDAAEQTRLYQNPTTYISVGTSTLNQRLVPKIATRSKVNGQSGRMEFFWTILKSNDAINFGSNGNFIAPENAYKIVKKGDSTIMKSELEYGNCNTKCQTPIGAINSSMPFHNIHPLTIGECPKYVKSNRLVLATGLRNSPQGERRRKKRGLFGAIAGFIEGGWQGMVDGWYGYHHSNEQGSGYAADKESTQKAIDGVTNKVNSIIDKMNTQFEAVGREFNNLERRIENLNKKMEDGFLDVWTYNAELLVLMENERTLDFHDSNVKNLYDKVRLQLRDNAKELGNGCFEFYHRCDNECMESVRNGTYDYPQYSEEARLKREEISGVKLESIGTYQILSIYSTVASSLALAIMVAGLFLWMCSNGSLQCRICI

SEQ ID NO: 143 - protein, 567 aa, Artificial Sequence
  NCBI influenza virus sequence
MEKIVLLLAIVSLVKSDQICIGYHANNSTEQVDTIMEKNVTVTHAQDILEKTHNGKLCNLDGVKPLILRDCSVAGWLLGNPMCDEFLNVPEWSYIVEKINPANDLCYPGNFNDYEELKHLLSRINHFEKIQIIPKNSWSDHEASGVSSACPYQGRSSFFRNVVWLTKKDNAYPTIKRSYNNTNQEDLLVLWGIHHPNDATEQTRLYQNPTTYISVGTSTLNQRLIPKIATRSKVNGQSGRMEFFWTILKSNDAINFESNGNFIAPENAYKIVKKGDSTIMKSELEYGNCNTKCQTPIGAINSSMPFHNIHPLTIGECPKYVKSNRLVLATGLRNSPQEERRRKKRGLFGAIAGFIEGGWQGMVDGWYGYHHSNEQGSGYAADKESTQKAIDGVTNKVNSIIDKMNTQFEAVGREFNNLERRIENLNKKMEDGFLDVWTYNAELLVLMENERTLDFHDSNVKNLYDKVRLQLRDNAKELGNGCFEFYHRCDNECMESVRNGTYDYPQYSEEARLKREEISGVKLESIGTYQILSIYSTVASSLALAIMVAGLFLWMCSNGSLQCRICI

SEQ ID NO: 144 - protein, 567 aa, Artificial Sequence
  NCBI influenza virus sequence
MEKIVLLLAIVSLVKSDQICIGYHANNSTEQVDTIMEKNVTVTHAQDILEKTHNGKLCNLDGVKPLILRDCSVAGWLLGNPMCDEFLNVPEWSYIVEKINPANDLCYPGNFNDYEELKHLLSRINHFEKIQIIPKNSWSDHEASGVSSACPYQGRSSFFRNVVWLTKKNSAYPTIKRSYNNTNQEDLLVLWGIHHPNDAAEQTRLYQNPTTYISVGTSTLNQRLVPKIATRSKVNGQSGRMEFFWTILKSNDAINFESNGNFIAPENAYKIVKKGDSTIMKSELEYSNCNTKCQTPIGAINSSMPFHNIHPLTIGECPKYVKSNRLVLATGLRNSPQGERRRKKRGLFGAIAGFIEGGWQGMVDGWYGYHHSNEQGSGYAADKESTQKAIDGVTNKVNSIIDKMNTQFEAVGREFNNLERRIENLNKKMEDGFLDVWTYNAELLVLMENERTLDFHDSNVKNLYDKVRLQLRDNAKELGNGCFEFYHRCDNECMESVRNGTYDYPQYSEEARLKREEISGVKLESIGTYQILSIYSTVASSLALAIMVAGLFLWMCSNGSLQCRICI

SEQ ID NO: 145 - protein, 567 aa, Artificial Sequence
  NCBI influenza virus sequence
MEKIVLLLAIVSLVKSDQICIGYHANNSTEQVDTIMERNVTVTHAQDILEKTHNGKLCNLDGVKPLILRDCSVAGWLLGNPMCDEFLNVPEWSYIVEKINPANDLCYPGNFNDYEELKHLLSRINHFEKIQIIPKNSWSDHEASGVSSACPYQGRSSFFRNVVWLTQKDNAYPTIKRSYNNTNQEDLLVLWGIHHPNDAAEQTRLYQNPTTYISVGTSTLNQRLIPKIATRSKVNGQSGRMEFFWTILKSNDAINFESNGNFIAPENAYKIVKKGDSTIMKSELEYGNCNTKCQTPIGAINSSMPFHNIHPLTIGECPKYVKSNRLVLATGLRNSPQGERRRKKRGLFGAIAGFIEGGWQGMVDGWYGYHHSNEQGSGYAADKESTQKAIDGVTNKVNSIIDKMNTQFEAVGREFNNLERRIENLNKKMEDGFLDVWTYNAELLVLMENERTLDFHDSNVKNLYDKVRLQLRDNAKELGNGCFEFYHRCDNECMESVRNGTYDYPQYSEEARLKREEISGVKLESIGTYQILSIYSTVASSLALAIMVAGLFLWMCSNGSLQCRICI

SEQ ID NO: 146 - protein, 567 aa, Artificial Sequence
  NCBI influenza virus sequence
MEKIVLLLAIVSLVKSDQICIGYHANNSTEQVDTIMEKNVTVTHAQDILEKTHNGKLCNLDGVKPLILRDCSVAGWLLGNPMCDEFLNVPEWSYIVEKINPANDLCYPGNFNDYEELKHLLSRINHFEKIKIIPKNSWSDHEASGVSSACPYQGRSSFFRNVVWLTKKDNAYPTIKRSYNNTNQEDLLVLWGIHHPNDAAEQTRLYQNPTTYISVGTSTLNQRLVPKIATRSKVNGQSGRMEFFWTILKSNDAINFESNGNFIAPENAYKIVKKGDSTIMKSELEYGNCNTKCQTPIGAINSSMPFHNIHPLTIGECPKYVKSNRLVLATGLRNSPQGERRRKKRGLFGAIAGFIEGGWQGMVDGWYGYHHSNEQGSGYAADKKSTQKAIDGVTNKVNSIIDKMNTQFEAVGREFNNLERRIENLNKKMEDGFLDVWTYNAELLVLMENERTLDFHDSNVKNLYDKVRLQLRDNAKELGNGCFEFYHRCDNECMESVRNGTYDYPQYSEEAKLKREEISGVKLESIGTYQILSIYSTVASSLALAIMVAGLFLWMCSNGSLQCRICI

SEQ ID NO: 147 - protein, 567 aa, Artificial Sequence; identical to SEQ ID NO: 73
  NCBI influenza virus sequence

SEQ ID NO: 148 - protein, 567 aa, Artificial Sequence
  NCBI influenza virus sequence
MEKIVLLLAIVSLVESDQICIGYHANNSTEQVDTIMEKNVTVTHAQDILEKTHNGKLCNLDGVKPLILRDCSVAGWLLGNPMCDEFLNVPEWSYIVEKINPANDLCYPGNFNDYEELKHLLSRINHFEKIQIIPKNSWSDHEASGVSSACPYQGRSSFFRNVVWLTKKDNAYPTIKRSYNNTNQEDLLVLWGIHHPNDAAEQTRLYQNPTTYISVGTSTLNQRLVPKIATRSKVNGQSGRMEFFWTILKSNDAINFESNGNFIAPENAYKIVKKGDSTIMKSELEYGNCNTKCQTPIGAINSSMPFHNIHPLTIGECPKYVKSNRLVLATGLRNSPQGERRRKKRGLFGAIAGFIEGGWQGMVDGWYGYHHSNEQGSGYAADKESTQKAIDGVTNKVNSIIDKMNTQFEAVGREFNNLERRIENLNKKMEDGFLDVWTYNAELLVLMENERTLDFHDSNVKNLYDKVRLQLRDNAKELGNGCFEFYHRCDNECMESVRNGTYDYPQYSEEARLKREEISGVKLESIGTYQILSIYSTVASSLALAIMVAGLFLWMCSNGSLQCRICI

SEQ ID NO: 149 - protein, 567 aa, Artificial Sequence
  NCBI influenza virus sequence
MEKIVLLLAIVSLVKSDQICIGYHANNSTEQVDTIMEKNVTVTHAQDILEKTHNGKLCNLDGVKPLILRDCSVAGWLLGNPMCDEFLNVPEWSYIVEKINPANDLCYPGNFNDYEELKHLLSRINHFEKIQIIPKNSWSDHEASGVSSACPYQGRSSFFRNVVWLTKKDNAYPTIKRSYNNTNQEDLLVLWGIHHPNDAAEQTRLYQNPTTYISVGTSTLNQRLVPKIATRSKVNGQSGRMEFFWTILKSNDAINFESNGNFIAPENAYKIVKKGDSTIMKSELEYGNCNTKCQTPIGAINSSMPFHNIHPLTIGECPKYVKSNRLVLATGLRNSPQGKRRRKKRGLFGAIAGFIEGGWQGMVDGWYGYHHSNEQGSGYAADKESTQKAIDGVTNKVNSIIDKMNTQFEAVGREFNNLERRIENLNKKMEDGFLDVWTYNAELLVLMENERTLDFHDSNVKNLYDKVRLQLRDNAKELGNGCFEFYHRCDNECMESVRNGTYDYPQYSEEARLKREEISGVKLESIGTYQILSIYSTVASSLALAIMVAGLFLWMCSNGSLQCRICI

SEQ ID NO: 150 - protein, 567 aa, Artificial Sequence
  NCBI influenza virus sequence
MEKIVLLLAIVSLVKSDQICIGYHANNSTEQVDTIMEKNVTVTHAQDILEKTHNGKLCNLDGVKPLILRDCSVAGWLLGNPMCDEFLNVPEWSYIVEKINPANDLCYPGNFNDYEELKHLLSRINHFEKIQIIPKNSWSDHEASGVSSACPYQGRSSFFRNVVWLTKKDNAYPTIKRSYNNTNQEDLLVLWGIHHPNDAAEQTRLYQNPTTYISVGTSTLNQRLVPKIATRSKVNGQSGRMEFFWTILKSNDAINFESNGNFIAPENAYKIVKKGDSTIMKSELEYGNCNTKCQTPIGAINSSMPFHNIHPLTIGECPKYVKSNRLVLATGLRNSPQGERRRKKRGLFGAIAGFIEGGWQGMVDGWYGYHHSNEQGSGYAADKESTQKAIDGVTNKVNSIIDKMNTQFEAVGREFNNLERRIENLNKKMEDGFLDVWTYNAELLVLMENERTLDFHDSNVKNLYDKVRLQLRDNAKELGNGCFEFYHRCDNECMESVRNGTYDYPQYSEEARLKREEISGVKLESIGTYQILSIYSTVVSSLALAIMVAGLFLWMCSNGSLQCRICI

SEQ ID NO: 151 - protein, 567 aa, Artificial Sequence
  NCBI influenza virus sequence
MEKIVLLLAIVSVVKSDQICIGYHANYSTEQVDTIMEKDVIVTHAQDILEKTHNGKLCNLEGMKPLILRDCSVAGWLLGNPMCDEFHNVPEWSYIVEKINPANDLCYPGNFDDYEELQHLFSRINHFEKIQIIPKNCWSDHEASGVSSACPYQGRSSFFRNVVWLTKKDNAYPTIKRSYNNTNQEDLLVLWGIHHPNDAAEQTRLYQNPTTYISVGTSTLNQRLVPKIATRSKVNGQSGRMEFFWTILKSNDAINFESNGNFIAPENAYKIVKKGDSTIMKSELEYGNCNTKCQTPIGAINSSMPFHNIHPLTIGECPKYVKSNRLVLATGLRNSPQGKRRRKKRGLFGAIAGFIEGGWQGMVDGWYGYHHSNEQGSGYAADKESTQKAIDGVTNKVNSIIDKMNTQFEAVGREFNNLERRIENLNKKMEDGFLDVWTYNAELLVLMENERTLDFHDSNVKNLYDKVRLQLRDNAKEFGNGCFEFYHRCDNECMESVRNGTYDYPQYSEEARLKREEISGVKLESIGTYQILSIYSTVASSLALAIMVAGLFLWMCSNGSLQCRICI

SEQ ID NO: 152 - protein, 567 aa, Artificial Sequence
  NCBI influenza virus sequence
MEKIMLLLAIVSLVKGDQICIGYHANNSTEQVDTIMEKNVTVTHAQDILEKTHNGKLCNLDGVKPLILRDCSVAGWLLGNPMCDEFLNVPEWSYIVEKINPANDLCYPGNFNDYEELKHLLSRINHFEKIQIIPKNSWSDHEASGVSSACPYQGRSSFFRNVVWLTKKDNAYPTIKRSYNNTNQEDLLVLWGIHHPNDAAEQTKLYQNPTTYISVGTSTLNQRLVPKIATRSKVNGQSGRMEFFWTILKSNDAINFESNGNFIAPENAYKIVKKGDSTIMKSELEYGNCNTKCQTPIGAINSSMPFHNIHPLTIGECPKYVKSNRLVLATGLRNSPQGERRRKKRGLFGAIVGFIEGGWQGMVDGWYGYHHSNEQGSGYAADKESTQKAIDGVTNKVNSIIDKMNTQFEAVGREFNNLERRIENLNKKMEDGFLDVWTYNAELLVLMENERTLDFHDSNVKNLYDKVRLQLRDNAKELGNGCFEFYHRCDNECMESVRNGTYDYPQYSEEARLKREEISGVKLESIGTYQILSIYSTVASSLALAIMVAGLFLWMCSNGSLQCRICI

SEQ ID NO: 153 - protein, 552 aa, Artificial Sequence
  NCBI influenza virus sequence
MEKIVLLLAIVSLVKSDQICIGYHANNSTEQVDTIMEKNVTVTHAQDILEKTHNGKLCNLDGVKPLILRDCSVAGWLLGNPMCDEFLNVPEWSYIVEKINPANDLCYPGNFNDYEELKHLLSRINHFEKIQIIPKNSWSDHEASGVSSACPYQGRSSFFRNVVWLTKKDNAYPTIKRSYNNTNQEDLLVLWGIHHPNDAAEQTRLYQNPTTYISVGTSTLNQRLVPKIATRSKVNGQSGRMEFFWTILKSNDAINFESNGNFIAPENAYKIVKKGDSTIMKSELEYSNCNTKCQTPIGAINSSMPFHNIHPLTIGECPKYVKSNRLVLATGLRNSPQGERRRKKRGLFGAIAGFIEGGWQGMVDGWYGYHHSNEQGSGYAADKESTQKAIDGVTNKVNSIIDKMNTQFEAVGREFNNLERRIENLNKKMEDGFLDVWTYNAELLVLMENERTLDFHDSNVKNLYDKVRLQLRDNAKELGNGCFEFYHRCDNECMESVRNGTYDYPQYSEEARLKREEISGVKLESIGTYQILSIYSTVASSLALAIMVAGLF

SEQ ID NO: 154 - protein, 567 aa, Artificial Sequence; identical to SEQ ID NO: 123
  NCBI influenza virus sequence

SEQ ID NO: 155 - protein, 567 aa, Artificial Sequence
  NCBI influenza virus sequence
  misc_feature (199)..(199): Xaa can be any naturally occurring amino acid
MEKIVLLLAIVSLVKSDQICIGYHANNSTEQVDTIMEKNVTVTHAQDILEKTHNGKLCNLDGVKPLILRDCSVAGWLLGNPMCDEFLNVPEWSYIVEKINPANDLCYPGNFNDYEELKHLLSRINHFEKIQIIPKNSWSDHETSGVSSACPYQGRSSFFRNVVWLTKKDNAYPTIKRSYNNTNQEDLLVLWGIHHPNDXAEQTRLYQNPTTYISVGTSTLNQRLVPKIATRSKVNGQSGRMEFFWTILKSNDAINFESNGNFIAPENAYKIVKKGDSTIMKSELEYSNCNTKCQTPIGAINSSMPFHNIHPLTIGECPKYVKSNRLVLATGLRNSPQGERRRKKRGLFGAIAGFIEGGWQGMVDGWYGYHHSNEQGSGYAADKESTQKAIDGVTNKVNSIIDKMNTQFEAVGREFNNLERRIENLNKKMEDGFLDVWTYNAELLVLMENERTLDFHDSNVKNLYDKVRLQLRDNAKELGNGCFEFYHKCDNECMESVRNGTYDYPQYSEEARLKREEISGVKLESIGTYQILSIYSTVASSLALAIMVAGLFLWMCSNGSLQCRICI

SEQ ID NO: 156 - protein, 567 aa, Artificial Sequence
  NCBI influenza virus sequence
MEKIVLLLAIVSLVKSDQICIGYHANNSTEQVDTIMEKNVTVTHAQDILEKAHNGKLCNLDGVKPLILRDCSVAGWLLGNPMCDEFLNVPEWSYIVEKINPANDLCYPGNFNDYEELKHLLSRINHFEKIQIIPKNSWSDHEASGVSSACPYQGRSSFFRNVVWLTKKDNAYPTIKRSYNNTNQEDLLILWGIHHPNDAAEQTRLYQNPTTYISVGTSTLNQRLVPKIATRSKVNGQSGRMEFFWTILKSNDAINFESNGNFIAPENAYKIVKKGDSTIMKSELEYGNCNTKCQTPIGAINSSMPFHNIHPLTIGECPKYVKSNRLVLATGLRNSPQGERRRKKRGLFGAIAGFIEGGWQGMVDGWYGYHHSNEQGSGYAADKESTQKAIDGVTNKVNSIIDKMNTQFEAVGREFNNLERRIENLNKKMEDGFLDVWTYNAELLVLMENERTLDFHDSNVKNLYDKVRLQLRDNAKELGNGCFEFYHRCDNECMESVRNGTYDYPQYSEEARLKREEISGVKLESIGTYQILSIYSTVASSLALAIMVAGLFLWMCSNGSLQCRICI

SEQ ID NO: 157 - protein, 567 aa, Artificial Sequence
  NCBI influenza virus sequence
MEKIVLLLAIVSLVKSDQICIGYHANNSTEQVDTIMEKNVTVTHAQDILEKTHNGKLCNLDGVKPLILRDCSVAGWLLGNPMCDEFLNVPEWSYIVEKINPANDLCYPGNFNDYEELKHLLSRINHFEKIQIIPKNSWSDHEASGVSSACPYQGRSSFFRNVVWLTKKDNAYPTIKRSYNNTNQEDLLVLWGIHHPNDAAEQTRLYQNPTTYISVGTSTLNQRLVPKIATRSKVNGQSGRMEFFWTILKSNDAINFESNGNFIAPENAYKIVKKGDSTIMKSELEYSNCNTKCQTPIGAINSSMPFHNIHPLTIGECPKYVKSNRLVLATGLRNSPQGERRRKKRGLFGAIAGFIEGGWQGMVDGWYGYHHSNEQGSGYAADKESTQKAIDGVTNKVNSIIDKMNTQFEAVGREFNNLERRIENLNKKMEDGFLDVWTYNAELLVLMENERTLDFHDSNVKNLYDKVRLQLRDNAKELGNGCFEFYHRCDNECMESVRNGTYDYPQYSEEARLKREEISGVKLESIGTYQILSIYSTVASSLALAIMVAGLFLWMCSNGSLQCRICI

SEQ ID NO: 158 - protein, 565 aa, Artificial Sequence
  NCBI influenza virus sequence
MEKIVLLLAIVSLVKSDQICIGYHANNSTEQVDTIMEKNVTVTHAQDILEKTHNGKLCNLDGVKPLILRDCSVAGWLLGNPMCDEFLNVPEWSYIVEKINPANDLCYPGNFNDYEELKHLLSRINHFEKIQIIPKNSWSDHEASGVSSACPYQGRSSFFRNVVWLTKKDNAYPTIKRSYNNTNQEDLLVLWGIHHPNDAAEQTRLYQNPTTYISVGTSTLNQRLVPKIATRSKVNGQSGRMEFFWTILKSNDAINFESNGNFIAPENAYKIVKKGDSTIMKSELEYGNCNTKCQTPIGAINSSMPFHNIHPLTIGECPKYVKSNRLVLATGLRNSPQGERRRKKRGLFGAIAGFIEGGWQGMVDGWYGYHHSNEQGSGYAADKESTQKAIDGVTNKVNSIIDKMNTQFEAVGREFNNLERRIENLNKKMEDGFLDVWTYNAELLVLMENERTLDFHDSNVKNLYDKVRLQLRDNAKELGNGCFEFYHRCDNECMESVRNGTYDYPQYSEEARLKREEISGVKLESIGTYQILSIYSTVASSLALAIMVAGLFLWMCSNGSLQCRI

SEQ ID NO: 159 - protein, 565 aa, Artificial Sequence
  NCBI influenza virus sequence
MEKIVLLLAIVSLVKSDQICIGYHANNSTEQVDTIMEKNVTVTHAQDILEKTHNGKLCNLDGVKPLILRDCSVAGWLLGNPMCDEFLNVPEWSYIVEKINPANDLCYPGNFNDYEELKHLLSRINHFEKIQIIPKNSWSDHEASGVSSACPYQGRSSFFRNVVWLTKKDNAYPTIKRSYNNTNQEDLLVLWGIHHPNDAAEQTRLYQNPTTYISVGTSTLNQRLVPKIATRSKVNGQSGRMEFFWTILKSNDAINFESNGNFIAPENAYKIVKKGDSTIMKSELEYSNCNTKCQTPIGAINSSMPFHNIHPLTIGECPKYVKSNRLVLATGLRNSPQGERRRKKRGLFGAIAGFIEGGWQGMVDGWYGYHHSNEQGSGYAADKESTQKAIDGVTNKVNSIIDKMNTQFEAVGREFNNLERRIENLNKKMEDGFLDVWTYNAELLVLMENERTLDFHDSNVKNLYDKVRLQLRDNAKELGNGCFEFYHRCDNECMESVRNGTYDYPQYSEEARLKREEISGVKLESIGTYQILSIYSTVASSLALAIMVAGLFLWMCSNGSLQCRI

SEQ ID NO: 160 - protein, 565 aa, Artificial Sequence
  NCBI influenza virus sequence
MEKIVLLLAIVSLVKSDQICIGYHANNSTEQVDTIMEKNVTVTHAQDILEKTHNGKLCNLDGVKPLILRDCSVAGWLLGNPMCDEFLNVPEWSYIVEKSNPANDLCYPGNFNDYEELKHLLSRINHFEKIQIIPKNSWSDHEASGVSSACPYQGRSSFFRNVVWLTKKDNAYPTIKRSYNNTNQEDLLVLWGIHHPNDAAEQTRLYQNPTTYISVGTSTLNQRLVPKIATRSKVNGQSGRMEFFWTILKSNDAINFESNGNFIAPENAYKIVKKGDSTIMKSELEYGNCNTKCQTPIGAINSSMPFHNIHPLTIGECPKYVKSNRLVLATGLRNSPQGERRRKKRGLFGAIAGFIEGGWQGMVDGWYGYHHSNEQGSGYAADKESTQKAIDGVTNKVNSIIDKMNTQFEAVGREFNNLERRIENLNKKMEDGFLDVWTYNAELLVLMENERTLDFHDSNVKNLYDKVRLQLRDNAKELGNGCFEFYHRCDNECMESVRNGTYDYPQYSEEARLKREEISGVKLESIGTYQILSIYSTVASSLALAIMVAGLFLWMCSNGSLQCRI

SEQ ID NO: 161 - protein, 567 aa, Artificial Sequence
  NCBI influenza virus sequence
MKKIVLLLAIVTLVKSDQICIGYHANNSTEQVDTIMEKNVTVTHAQDILEKTHNGKLCNLDGVKPLILRDCSVAGWLLGNPMCDEFLNVPEWSYIVEKINPANDLCYPGNFNDYEELKHLLSRINHFEKIQIIPKNSWSDHEASGVSSACPYQGRSSFFRNVVWLTKKDNAYPTIKRSYNNTNQEDLLVLWGIHHPNDAAEQTRLYQNPTTYISVGTSTLNQRLVPKIATRSKVNGQSGRMEFFWTILKSNDAINFESNGNFIAPENAYKIVKKGDSTIMKSELEYGNCNTKCQTPIGAINSSMPFHNIHPLTIGECPKYVKSNRLVLATGLRNSPQGERRRKKRGLFGAIAGFIEGGWQGMVDGWYGYHHSNEQGSGYAADKESTQKAIDGVTNKVNSIIDKMNTQFEAVGREFNNLERRIENLNKKMEDGFLDVWTYNAELLVLMENERTLDFHDSNVKNLYDKVRLQLRDNAKELGNGCFEFYHRCDNECMESVRNGTYDYPQYSEEARLKREEISGVKLESIGTYQILSIYSTVASSLALAIMVAGLSLWMCSNGSLQCRICI

SEQ ID NO: 162 - protein, 567 aa, Artificial Sequence
  NCBI influenza virus sequence
MEKIVLLLAIVSLVKSDQICIGYHANNSTEQVDTIMEKNVTVTHAQDILEKTHNGKLCNLDGVKPLILRDCSVAGWLLGNPMCDEFLNVPEWSYIVEKINPANDLCYPGNFNDYEELKHLLSRINHFEKIQIIPKSSWSDHEASGVSSACPYQGRSSFFRNVVWLTKKDNAYPTIKRSYNNTNQEDLLVLWGIHHPNDAAEQTRLYQNPTTYISVGTSTLNQRLVPKIATRSKVNGQSGRMEFFWTILKSNDAINFESNGNFIAPENAYKIVKKGDSTIMKSELEYGNCNTKCQTPIGAINSSMPFHNIHPLTIGECPKYVKSNRLVLATGLRNSPQGERRRKKRGLFGAIAGFIEGGWQGMVDGWYGYHHSNEQGSGYAADKESTQKAIDGVTNKVNSIIDKMNTQFEAVGREFNNLERRIENLNKKMEDGFLDVWTYNAELLVLMENERTLDFHDSNVKNLYDKVRLQLRDNAKELGNGCFEFYHRCDNECMESVRNGTYDYPQYSEEARLKREEISGVKLESIGTYQILSIYSTVASSLALAIMVAGLFLWMCSNGSLQCRICI

SEQ ID NO: 163 - protein, 567 aa, Artificial Sequence; identical to SEQ ID NO: 128
  NCBI influenza virus sequence

SEQ ID NO: 164 - protein, 567 aa, Artificial Sequence
  NCBI influenza virus sequence
MEKIVLLLAIVSLVKSDQICIGYHANNSTEQVDTIMEKNVTVTHAQDILEKTHNGKLCNLDGVKPLILRDCSVAGWLLGNPMCDEFLNVPEWSYIVEKINPANDLCYPGNFNDYEELKHLLSRINHFEKIQIIPKNSWSDHEASGVSSACPYQGRSSFFRNVVWLTKKNSAYPTIKRSYNNTNQEDLLVLWGIHHPNDAAEQTRLYQNPTTYISVGTSTLNQRLVPKIATRSKVNGQSGRMEFFWTILKSNDAINFESNGNFIAPENAYKIVKKGDSTIMKSELEYSNCNTKCQTPIGAINSSMPFHNIHPLTIGECPKYVKSNRLVLATGLRNSPQGERRRKKRGLFGAIAGFIEGGWQGMVDGWYGYHHSNEQGSGYAADKESTQKAIDGVTNKVNSIIDKMNTQFEAVGREFNNLERRIENLNKKMEDGFLDVWTYNAELLVLMENERTLDFHDSNVKNLYDKVRLQLRDNAKELGNGCFEFYHRCDNECMESVRNGTYDYPQYSEEARLKREEISGVKLESIGIYQILSIYSTVASSLALAIMVAGLFLWMCSNGSLQCRICI

SEQ ID NO: 165 - protein, 567 aa, Artificial Sequence
  NCBI influenza virus sequence
MEKIVLLLAIVSIVKSDQICIGYHANNSTEQVDTIMEKNVTVTHAQDILEKTHNGKLCNLDGVKPLILRDCSVAGWLLGNPMCDEFLNVPEWSYIVEKINPANDLCYPGNFNDYEELKHLLSRINHFEKIQIIPKNSWSDHEASGVSSACPYQGRSSFFRNVVWLTKKNNAYPTIKRSYNNTNQEDLLVLWGIHHPNDAAEQTRLYQNPTTYISVGTSTLNQRLVPKIATRSKVNEQSGRMEFFWTILKSNDAINFESNGNFIAPENAYKIVKKGDSTIMKSELEYGNCNTKCQTPIGAINSSMPFHNIHPLTIGECPKYVKSNRLVLATGLRNSPQGERRRKKRGLFGAIAGFIEGGWQGMVDGWYGYHHSNEQGSGYAADKESTQKAIDGVTNKVNSIIDKMNTQFEAVGREFNNLERRIENLNKKMEDGFLDVWTYNAELLVLMENERTLDFHDSNVKNLYDKVRLQLRDNAKELGNGCFEFYHRCDNECMESVRNGTYDYPQYSEEARLKREEISGVKLESIGTYQILSIYSTVASSLALAIMVAGLFLWMCSNGSLQCRICI

SEQ ID NO: 166 - protein, 565 aa, Artificial Sequence
  NCBI influenza virus sequence
MEKIVLLLAIVSLVKSDQICIGYHANNSTEQVDTIMEKNVTVTHAQDILEKTHNGKLCNLDGVKPLILRDCSVAGWLLGNPMCDEFLNVPEWSYIVEKINPANDLCYPGNFNDYEELKHLLSRINHFEKIQIIPKNSWSDHEASGVSSACPYQGRSSFFRNVVWLTKKDNAYPTIKRSYNNTNQEDLLVLWGIHHPNDAAEQTRLYQNPTTYISVGTSTLNQRLIPKIATRSKVNGQSGRMEFFWTILKSNDAINFESNGNFIAPENAYKIVKKGDSTIMKSELEYGNCNTKCQTPIGAINSSMPFHNIHPLTIGECPKYVKSNRLVLATGLRNSPQGERRRKKRGLFGAIAGFIEGGWQGMVDGWYGYHHSNEQGSGYAADKESTQKAIDGVTNKVNSIIDKMNTQFEAVGREFNNLERRIENLNKKMEDGFLDVWTYNAELLVLMENERTLDFHDSNVKNLYDKVRLQLRDNAKELGNGCFEFYHRCDNECMESVRNGTYDYPQYSEEARLKREEISGVKLESIGTYQILSIYSTVASSLALAIMVAGLFLWMCSNGSLQCRI

SEQ ID NO: 167 - protein, 565 aa, Artificial Sequence
  NCBI influenza virus sequence
MEKIVLLLAIVSLVKSDQICIGYHANNSTEQVDTIMEKNVTVTHAQDILEKTHNGKLCNLDGVKPLILRDCSVAGWLLGNPMCDEFLNVPEWSYIVEKINPANDLCYPGNFNDYEELKHLLSRINHFEKIQIIPKNSWSDHEASGVSSACPYQGRSSFFRNVVWLTKKDNAYPTIKRSYNNTNQEDLLVLWGIHHPNDAAEQTRLYQNPTTYISVGTSTLNQRLVPKIATRSKVNGQSGRMEFFWTILKSNDAINFESNGNFIAPENAYKIVKKGDSTIMKSELEYGNCNTKCQTPIGAINSSMPFHNIHPLTIGECPKYVKSNRLVLATGLRNSPQRERRRKKRGLFGAIAGFIEGGWQGMVDGWYGYHHSNEQGSGYAADKESTQKAIDGVTNKVNSIIDKMNTQFEAVGREFNNLERRIENLNKKMEDGFLDVWTYNAELLVLMENERTLDFHDSNVKNLYDKVRLQLRDNAKELGNGCFEFYHRCDNECMESVRNGTYDYPQYSEEARLKREEISGVKLESIGTYQILSIYSTVASSLALAIMVAGLFLWMCSNGSLQCRI

SEQ ID NO: 168 - protein, 565 aa, Artificial Sequence
  NCBI influenza virus sequence
  misc_feature (220)..(220): Xaa can be any naturally occurring amino acid
MEKIVLLLAIVSLVKSDQICIGYHANNSTEQVDTIMEKNVTVTHAQDILEKTHNGKLCNLDGVKPLILRDCSVAGWLLGNPMCDEFLNVPEWSYIVEKINPANDLCYPGNFNDYEELKHLLSRINHFEKIQIIPKNSWSDHEASGVSSACPYQGRSSFFRNVVWLTKKDNAYPTIKRSYNNTNQEDLLVLWGIHHPNDAAEQTRLYQNPTTYISVGTSTXNQRLIPKIATRSKVNGQSGRMEFFWTILKSNDAINFESNGNFIAPENAYKIVKKGDSTIMKSELEYGNCNTKCQTPIGAINSSMPFHNIHPLTIGECPKYVKSNRLVLATGLRNSPQGERRRKKRGLFGAIAGFIEGGWQGMVDGWYGYHHSNEQGSGYAADKESTQKAIDGVTNKVNSIIDKMNTQFEAVGREFNNLERRIENLNKKMEDGFLDVWTYNAELLVLMENERTLDFHDSNVKNLYDKVRLQLRDNAKELGNGCFEFYHRCDNECMESVRNGTYDYPQYSEEARLKREEISGVKLESIGTYQILSIYSTVASSLALAIMVAGLFLWMCSNGSLQCRI

SEQ ID NO: 169 - protein, 559 aa, Artificial Sequence
  NCBI influenza virus sequence
LLAIVSLVKSDQICIGYHANNSTEQVDTIMEKNVTVTHAQDILEKTHNGKLCNLDGVKPLILRDCSVAGWLLGNPMCDEFLNVPEWSYIVEKINPVNDLCYPGNFNDYEELKHLLSRINHFEKIQIIPKNSWSDHEASGVSSACPYQGRSSFFRNVVWLTKKDNAYPTIKRSYNNTNQEDLLVLWGIHHPNDAAEQTRLYQNPTTYISVGTSTLNQRLVPKIATRSKVNGQSGRMEFFWTILRSNDAINFESNGNFIAPENAYKIVKKGDSTIMKSELEYGNCNTKCQTPIGAINSSMPFHNIHPLTIGECPKYVKSNRLVLATGLRNSPQGERRRKKRGLFGAIAGFIEGGWQGMVDGWYGYHHSNEQGSGYAADKESTQKAIDGVTNKVNSIIDKMNTQFEAVGREFNNLERRIENLNKKMEDGFLDVWTYNAELLVLMENERTLDFHDSNVKNLYDKVRLQLRDNAKELGNGCFEFYHRCDNECMESVRNGTYDYPQYSEEARLKREEISGVKLESIGTYQILSIYSTVASSLALAIMVAGLFLWMCSNGSLQCRI

SEQ ID NO: 170 - protein, 565 aa, Artificial Sequence
  NCBI influenza virus sequence
MEKIVLLLAIVSLVKSDQICIGYHANNSTEQVDTIMEKNVTVTHAQDILEKTHNGKLCNLDGVKPLILRDCSVAGWLLGNPMCDEFLNVPEWSYIVEKINPANDLCYPGNFNDYEELKHLLSRINHFEKIQIIPKNSWSDHEASGVSSACPYQGRSSFFRNVVWLTKKDDAYPTIKRSYNNTNQEDLLVLWGIHHPNDAAEQTRLYQNPTTYISVGTSTLNQRLVPKIATRSKVNGQSGRMEFFWTILKSNDAINFESNGNFIAPENAYKIVKKGDSTIMKSELEYGNCNTKCQTPIGAINSSMPFHNIHPLTIGECPKYVKSNRLVLATGLRNSPQGERRRKKRGLFGAIAGFIEGGWQGMVDGWYGYHHSNEQGSGYAADKESTQKAIDGVTNKVNSIIDKMNTQFEAVGREFNNLERRIENLNKKMEDGFLDVWTYNAELLVLMENERTLDFHDSNVKNLYDKVRLQLRDNAKELGNGCFEFYHRCDNECMESVRNGTYDYPQYSEEARLKREEISGVKLESIGTYQILSIYSTVASSLALAIMVAGLFLWMCSNGSLQCRI

SEQ ID NO: 171 - protein, 565 aa, Artificial Sequence
  NCBI influenza virus sequence
MEKIVLLLAIVSLVKSDQICIGYHANNSTEQVDTIMEKNVTVTHAQDILEKTHNGKLCNLDGVKPLILRDCSVAGWLLGNPMCDEFLNVPEWSYIVEKINPANDLCYPGNFNDYEELKHLLSRINHFEKIQIIPKNSWSDHEASGVSSACPYQGRSSFFRNVVWITKKDNAYPTIRRSYNNTNQEDLLVLWGIHHPNDAAEQTRLYQNPTTYISVGTSTLNQRLIPKIATRSKVNGQSGRMEFFWTILKSNDAINFESNGNFIAPENAYKIVKKGDSTIMKSELEYGNCNTKCQTPIGAINSSMPFHNIHPLTIGECPKYVKSNRLVLATGLRNSPQGERRRKKRGLFGAIAGFIEGGWQGMVDGWYGYHHSNEQGSGYAADKESTQKAIDGVTNKVNSIIDKMNTQFEAVGREFNNLERRIENLNKKMEDGFLDVWTYNAELLVLMENERTLDFHDSNVKNLYDKVRLQLRDNAKELGNGCFEFYHRCDNECMESVRNGTYDYPQYSEEARLKREEISGVKLESIGTYQILSIYSTVASSLALAIMVAGLFLWMCSNGSLQCRI

SEQ ID NO: 172 - protein, 565 aa, Artificial Sequence
  NCBI influenza virus sequence
MEKIVLLLAIVSLVKSDQICIGYHANNSTEQVDTIMEKNVTVTHAQDILEKTHNGKLCNLDGVKPLILRDCSVAGWLLGNPMCDEFLNVPEWSYIVEKINPANDLCYPGNFNDYEELKHLLSRINHFEKIQIIPKNSWSDHEASGVSSACPYQGISSFFRNVVWLTKKDNAYPTIKRSYNNTNQEDLLVLWGIHHPNDAAEQTRLYQNPTTYISVGTSTLNQRLVPKIATRSKVNGQSGRMEFFWTILKSNDAINFESNGNFIAPENAYKIVKKGDSTIMKSELEYSNCNTKCQTPIGAINSSMPFHNIHPITIGECPKYVKSNRLVLATGLRNSPQGERRRKKRGLFGAIAGFIEGGWQGMVDGWYGYHHSNEQGSGYAADKESTQKAIDGVTNKVNSIIDKMNTQFEAVGREFNNLERRIENLNKKMEDGFLDVWTYNAELLVLMENERTLDFHDSNVKNLYDKVRLQLRDNAKELGNGCFEFYHRCDNECMESVRNGTYDYPQYSEEARLKREEISGVKLESIGTYQILSIYSTVASSLALAIMVAGLFLWMCSNGSLQCRI

SEQ ID NO: 173 - protein, 553 aa, Artificial Sequence
  NCBI influenza virus sequence
LVKSDQICVGYHANNSTEQVDTIMEKNVTVTHAQDILEKTHNGKLCNLDGVKPLILRDCSVAGWLLGNPMCDEFLNVPEWSYIVEKINPANDLCYPGNFNDYEELKHLLSRINHFEKIQIIPKNSWSDHEASGVSSACPYQGRSSFFRNVVWLTKKDNAYPTIKRSYNNTNQEDLLVLWGIHHPNDAAEQTRLYQNPTTYISVGTSTLNQRLVPKIATRSKVNGQSGRMEFFWTILKSNDAINFESNGNFIAPENAYKIVKKGDSTIMKSELEYGNCNTKCQTPIGAINSSMPFHNIHPLTIGECPKYVKSNRLVLVTGLRNSPQGERRRKKRGLFGAIAGFIEGGWQGMVDGWYGYHHSNEQGSGYAADKESTQKAIDGVTNKVNSIIDKMNTQFEAVGREFNNLERRIENLNKKMEDGFLDVWTYNAELLVLMENERTLDFHDSNVKNLYDKVRLQLRDNAKELGNGCFEFYHRCDNECMESVRNGTYDYPQYSEEARLKREEISGVKLESIGTYQILSIYSTVASSLALAIMVAGLFLWMCSNGSLQCRI

SEQ ID NO: 174 - protein, 567 aa, Artificial Sequence
  NCBI influenza virus sequence
MEKIVLLLAIVSLVKSDQICIGYHANNSTEQVDTIMEKNVTVTHAQDILEKTHNGKLCNLDGVKPLILRDCSVAGWLLGNPMCDEFLNVPEWSYIVEKINPANDLCYPGNFNDYEELKHLLSRINHFEKIQIIPKNSWSDHEASGVSSACPYQGRSSFFRNVVWLTKKDNAYPTIKRSYNNTNQEDLLVLWGIHHPNDATEQTRLYQNPTTYISVGTSTLNQRLVPKIATRSKVNGQSGRMEFFWTILKSNDAINFESNGNFIAPENAYKIVKKGDSTIMKSELEYGNCNTKCQTPIGAINSSMPFHNIHPLTIGECPKYVKSNRLVLATGLRNSPQGERRRKKRGLFGAIAGFIEGGWQGMVDGWYGYHHSNEQGSGYAADKESTQKAIDGVTNKVNSIIDKMNTQFEAVGREFNNLERRIENLNKKMEDGFLDVWTYNAELLVLMENERTLDFHDSNVKNLYDKVRLQLRDNAKELGNGCFEFYHRCDNECMESVRNGTYDYPQYSEEARLKREEISGVKLESIGTYQILSIYSTVASSLALAIMVAGLFLWMCSNGSLQCRICI

SEQ ID NO: 175 - protein, 567 aa, Artificial Sequence
  NCBI influenza virus sequence
MEKIVLLLAIVSLVKSDQICIGYHANNSTEQVDTIMEKNVTVTHAQDILEKTHNGKLCNLDGVKPLILRDCSVAGWLLGNPMCDEFLNVPEWSYIVEKINPANDLCYPGNFNDYEELKHLLSRINHFEKIQIIPKNSWSDHEASGVSSACPYQGRSSFFRNVVWLTKKDNAYPTIKRSYNNTNQEDLLVLWGIHHPNDATEQTRLYQNPTTYISVGTSTLNQRLVPKIATRSKVNGQSGRMEFFWTILKSNDAINFESNGNFIAPENAYKIVKKGDSTIMKSELEYGNCNTKCQTPIGAINSSMPFHNIHPLTIGECPKYVKSNRLVLATGLRNSPQGERRRKKRGLFGAIAGFIEGGWQGMVDGWYGYHHSNEQGSGYAADKESTQKAIDGVTNKVNSIIDKMNTQFEAVGREFNNLERRIENLNKKMEDGFLDVWTYNAELLVLMENERTLDFHDSNVKNLYDKVRLQLRDNAKELGNGCFEFYHRCDNECMESVRNGTYDYPQYSEEARLKREEISGVKLESIGTYQILSIYSTVTSSLALAIMVAGLFLWMCSNGSLQCRICI

SEQ ID NO: 176 - protein, 567 aa, Artificial Sequence
  NCBI influenza virus sequence
MEKIVLLLAIVSLVKSDQICIGYHANNSTEQVDTIMEKNVTVTHAQDILEKTHNGKLCNLDGVKPLILRDCSVAGWLLGNPMCDEFLNVPEWSYIVEKINPANDLCYPGNFNDYEELKHLLSRINHFEKIQIIPKNSWSDHEASGVSSACPYQGRSSFFRNVVWLTKKDNAYPTIKRSYNNTNQEDLLVLWGIHHPNDAAEQTRLYQNPTTYISVGTSTLNQRLVPKIATRSKVNGQSGRMEFFWTILKSNDAINFESNGNFIAPENAYKIVKKGDSTIMKSELEYGNCNTKCQTPIGAINSSMPFHNIHPLTIGECPKYVKSNRLVLATGLRNSPQGERRRKKRGLFGAIAGFIEGGWQGMVDGWYGYHHSNEQGSGYAADKESTQKAIDGVTNKVNSIIDKMNTQFEAVGREFNNLERRIENLNKKMEDGFLDVWTYNAELLVLMENERTLDFHDSNVKNLYDKVRLQLRDNAKELGNGCFEFYHRCDNECMESVRNGTYDYPQYSEEARLKREEISGVKLESIGTYQILSIYSTVASSLALAIMVAGIFLWMCSNGSLQCRICI

SEQ ID NO: 177 - protein, 553 aa, Artificial Sequence
  NCBI influenza virus sequence
KSDQICIGYHANNSTEQVDTIMEKNVTVTHAQDILEKTHNGKLCNLDGVKPLILRDCSVAGWLLGNPMCDEFLNVPEWSYIVEKINPANDLCYPGNFNDYEELKHLLSRINHFEKIQIIPKNYWSDHEASGVSSACPYQGRSSFFRNVVWLTKKNNAYPTIKRSYNNTNQEDLLVLWGIHHPNDAEEQTRLYQNPTTYISVGTSTLNQRLVPKIATRSKVNGQSGRMEFFWTILKSNDAINFESNGNFIAPENAYKIVKKGDSTIMKSELEYGNCNTKCQTPIGAINSSMPFHNIHPLTIGECPKYVKSNRLVLATGLRNSPQGERRRKKRGLFGAIAGFIEGGWQGMVDGWYGYHHSNEQGSGYAADKESTQKAIDGVTNKVNSIIDKMNTQFEAVGREFNALERRIENLNKKMEDGFLDVWTYNAELLVLMENERTLDFHDSNVKNLYDKVRLQLRDNAKELGNGCFEFYHRCDNECMESVRNGTYDYPQYSEEARLKREEISGVKLESIGTYQILSIYSTVASSLALAIMVAGLFLWMCSNGSLQCRICI

SEQ ID NO: 178 - protein, 565 aa, Artificial Sequence
  NCBI influenza virus sequence
MEKIVLLLAIVSLVKSDQICIGYHANNSTEQVDTIMEKNVTVTHAQDILEKTHNGKLCNLDGVKPLILRDCSVAGWLLGNPMCDEFLNVPEWSYIVEKINPANDLCYPGNFNDYEELKHLLSRINHFEKIQIIPKNSWSDHEASGVSSACPYQGRSSFFRNVVWLTKKNNAYPTIKRSYNNTNQEDLLVLWGIHHPNDAAEQTRLYQNPTTYISVGTSTLNQRLIPKIATRSKVNGQSGRMEFFWTILKSNDAINFESNGNFIAPENAYKIVKKGDSTIMKSELEYGNCNTKCQTPIGAINSSMPFHNIHPLTIGECPKYVKSNRLVLATGLRNSPQGERRRKKRGLFGAIAGFIEGGWQGMVDGWYGYHHSNEQGSGYAADKESTQKAIDGVTNKVNSIIDKMNTQFEAVGREFNNLERRIENLNKKMEDGFLDVWTYNAELLVLMENERTLDFHDSNVKNLYDKVRLQLRDNAKELGNGCFEFYHRCDNECMESVRNGTYDYPQYSEEARLKREEISGVRLESIGTYQILSIYSTVASSLALAIMVAGLFLWMCSNGSLQCRI

SEQ ID NO: 179 - protein, 565 aa, Artificial Sequence
  NCBI influenza virus sequence
MEKIVLLLAIVSLVKSDQICIGYHANNSTEQVDTIMEKNVTVTHAQDILEKTHNGKLCNLDGVKPLILRDCSVAGWLLGNPMCDEFLNVPEWSYIVEKINPANDLCYPGNFNDYEELKHLLSRINHFEKIQIIPKNSWSDHEASGVSSACPYQGRSSFFRNVVWLTKKDNAYPTIKRSYNNTNQEDLLVLWGIHHPNDATEQTRLYQNPTTYISVGTSTLNQRLIPKIATRSKVNGQSGRMEFFWTILKSNDAINFESNGNFIAPENAYKIVKKGDSTIMKSELEYGNCNTKCQTPIGAINSSMPFHNIHPLTIGECPKYVKSNRLVLATGLRNSPQEERRRKKRGLFGAIAGFIEGGWQGMVDGWYGYHHSNEQGSGYAADKESTQKAIDGVTNKVNSIIDKMNTQFEAVGREFNNLERRIENLNKKMEDGFLDVWTYNAELLVLMENERTLDFHDSNVKNLYDKVRLQLRDNAKELGNGCFEFYHRCDNECMESVRNGTYDYPQYSEEARLKREEISGVKLESIGTYQILSIYSTVASSLALAIMVAGLFLWMCSNGSLQCRI

SEQ ID NO: 180 - protein, 561 aa, Artificial Sequence
  NCBI influenza virus sequence
LLAIVSLVKSDQICIGYHANNSTEQVDTIMEKNVTVTHAQDILEKTHNGKLCNLDGVKPLILRDCSVAGWLLGNPMCDEFLNVPEWSYIVEKINPANDLCYPGNFNDYEELKHLLSRINHFEKIQIIPKNSWSDHEASGVSSACPYQGRSSFFRNVVWLTKKDNAYPTIKRSYNNTNQEDLLVLWGIHHPNDAAEQTRLYQNPTTYISVGTSTLNQRLVPKIATRSKVNGQSGRMEFFWTILKSNDAINFESNGNFIAPENAYKIVKKGDSTIMKSELEYGNCNTKCQTPIGAINSSMPFHNIHPLTIGECPKYVKSNRLVLATGLRNGPQGERRRKKRGLFGAIAGFIEGGWQGMVDGWYGYHHSNEQGSGYAADKESTQKAIDGVTNKVNSIIDKMNTQFEAVGREFNNLERRIENLNKKMEDGFLDVWTYNAELLVLMENERTLDFHDSNVKNLYDKVRLQLRDNAKELGNGCFEFYHRCDNECMESVRNGTYDYPQYSEEARLKREEISGVKLESIGTYQILSIYSTVASSLALAIMVAGLFLWMCSNGSLQCRICI

SEQ ID NO: 181 - protein, 567 aa, Artificial Sequence
  NCBI influenza virus sequence
MEKMVLLLAIVSLVKSDQICIGYHANNSTEQVDTIMEKNVTVTHAQDILEKTHNGKLCNLDGVKPLILRDCSVAGWLLGNPMCDEFLNVPEWSYIVEKINPANDLCYPGNFNDYEELKHLLSRINHFEKIQIIPKNSWSDHEASGVSSACPYQGRSSFFRNVVWLTKKDNAYPTIKRSYNNTNQEDLLVLWGIHHPNDAAEQTRLYQNPTTYISVGTSTLNQRLVPKIATRSKVNGQSGRMEFFWTILKSNDAINFESNGNFIAPENAYKIVKKGDSTIMKSELEYGNCNTKCQTPIGAINSSMPFHNIHPLTIGECPKYVKSNRLVLATGLRNGPQGERRRKKRGLFGAIAGFIEGGWQGMVDGWYGYHHSNEQGSGYAADKESTQKAIDGVTNKVNSIIDKMNTQFEAVGREFNNLERRIENLNKKMEDGFLDVWTYNAELLVLMENERTLDFHDSNVKNLYDKVRLQLRDNAKELGNGCFEFYHRCDNECMESVRNGTYDYPQYSEEARLKREEISGVKLESIGTYQILSIYSTVASSLALAIMVAGLFLWMCSNGSLQCRICI

SEQ ID NO: 182 - protein, 567 aa, Artificial Sequence
  NCBI influenza virus sequence
MEKIVLLLAIVSLVKSDQICIGYHANNSTEQVDTIMEKNVTVTHAQDILEKTHNGKLCNLDGVKPLILRDCSVAGWLLGNPMCDEFLNVPEWSYIVEKINPANDLCYPGNFNDYEELKHLLSRINHFEKIQIIPKNSWSDHEASGVSSACPYQGRSSFFRNVVWLTKKNSAYPTIKKSYNNTNQEDLLVLWGIHHPNDAEEQTRLYQNPTTYISVGTSTLNQRLVPKIATRSKVNGQSGRMEFFWTILKSNDAINFESNGNFIAPENAYKIVKKGDSTIMKSELEYGNCNTKCQTPIGAINSSMPFHNIHPLTIGECPKYVKSNRLVLATGLRNSPQGERRRKKRGLFGAIAGFIEGGWQGMVDGWYGYHHSNEQGSGYAADKESTQKAIDGVTNKVNSIIDKMNTQFEAVGREFNALERRIENLNKKMEDGFLDVWTYNAELLVLMENERTLDFHDSNVKNLYDKVRLQLRDNAKELGNGCFEFYHRCDNECMESVRNGTYDYPQYSEEARLKREEISGVKLESIGTYQILSIYSTVASSLALAIMVAGLSLWMCSNGSLQCRICI

SEQ ID NO: 183 - protein, 567 aa, Artificial Sequence
  NCBI influenza virus sequence
MEKIVLLLAIVSIVKSDQICIGYHANNSTEQVDTIMEKNVTVTHAQDILEKTHNGKLCNLNGVKPLILRDCSVAGWLLGNPMCDEFLNVPEWSYIVEKINPANDLCYPGNFNDYEELKHLLSRINHFEKIQIIPKNSWSDHEASGVSSACPYQGRSSFFRNVVWLTKKNNAYPTIKKSYNNTNQEDLLVLWGIHHPNDAAEQTKLYQNPTTYISVGTSTLNQRLVPKIATRSKVNGQSGRMEFFWTILKSNDAINFESNGNFIAPENAYKIVKKGDSTIMKSELEYGNCNTKCQTPIGAINSSMPFHNIHPLTIGECPKYVKSNRLVLATGLRNSPQGERRRKKRGLFGAIAGFIEGGWQGMVDGWYGYHHSNEQGSGYAADKESTQKAIDGVTNKVNSIIDKMNTQFEAVGREFNNLERRIENLNKKMEDGFLDVWTYNAELLVLMENERTLDFHDSNVKNLYDKVRLQLRDNAKELGNGCFEFYHRCDNECMESVRNGTYDYPQYSEEARLKREEISGVKLESIGTYQILSIYSTVASSLALAIMVAGLFLWMCSNGSLQCRICI

SEQ ID NO: 184 - protein, 567 aa, Artificial Sequence
  NCBI influenza virus sequence
MEKIVLLLAIVSLVKSDQICIGYHANNSTEQVDTIMEKNVTVTHAQDILEKTHNGKLCNLDGVKPLILRDCSVAGWLLGNPMCDEFLNVPEWSYIVEKINPANDLCYPGNFNDYEELKHLLSRINHFEKIQIIPKNSWSDHEASGVSSACPYQGRSSFFRNVVWLTKKDNAYPTIKRSYNNTNQEDLLVLWGIHHPNDATEQTRLYQNPTTYISVGTSTLNQRLVPKIATRSKVNGQSGRMEFFWTILKSNDAINFDSNGNFIAPENAYKIVKKGDSTIMKSELEYGNCNTKCQTPIGAINSSMPFHNIHPLTIGECPKYVKSNRLVLATGLRNSPQGERRRKKRGLFGAIAGFIEGGWQGMVDGWYGYHHSNEQGSGYAADKESTQKAIDGVTNKVNSIIDKMNTQFEAVGREFNNLERRIENLNKKMEDGFLDVWTYNAELLVLMENERTLDFHDSNVKNLYDKVRLQLRDNAKELGNGCFEFYHRCDNECMESVRNGTYDYPQYSEEARLKREEISGVKLESIGTYQILSIYSTVASSLALAIMVAGLFLWMCSNGSLQCRICI

SEQ ID NO: 185 - protein, 567 aa, Artificial Sequence
  NCBI influenza virus sequence
MEKIVLLLAIVSIVKSDQICIGYHANNSTEQVDTIMEKNVTVTHAQDILEKTHNGKLCNLDGVKPLILRDCSVAGWLLGNPMCDEFLNVPEWSYIVEKINPANDLCYPGNFNDYEELKHLLSRINHFEKIQIIPKNSWSDHEASGVSSACPYQGRSSFFRNVVWLTKKNNAYPTIKKSYNNTNQEDLLVLWGIHHPNDAAEQTRLYQNPTTYISVGTSTLNQRLVPKIATRPKVNGQSGRMEFFWTILKSNDAINFESNGNFIAPENAYKIVKKGDSTIMKSELEYGNCNTKCQTPIGAINSSMPFHNIHPLTIGECPKYVKSNRLVLATGLRNSPQGERRRKKRGLFGAIAGFIEGGWQGMVDGWYGYHHSNEQGSGYAADKESTQKAIDGVTNKVNSIIDKMNTQFEAVGREFNNLERRIENLNKKMEDGFLDVWTYNAELLVLMENERTLDFHDSNVKNLYDKVRLQLRDNAKELGNGCFEFYHRCDNECMESVRNGTYDYPQYSEEARLKREEISGVKLESIGTYQILSIYSTVASSLALAIMVAGLFLWMCSNGSLQCRICI

SEQ ID NO: 186 - protein, 567 aa, Artificial Sequence
  NCBI influenza virus sequence
MEKIVLLLAIVSIVKSDQICIGYHANNSTEQVDTIMEKNVTVTHAQDILEKTHNGKLCNLDGVKPLILRDCSVAGWLLGNPMCDEFLNVPEWSYIVEKINPANDLCYPGNFNDYEELKHLLSRINHFEKIQIIPKNSWSDHEASGVSSACPYQGRSSFFRNVVWLTKKNNAYPTIKKSYNNTNQEDLLVLWGIHHPNDAAEQTRLYQNPTTYISVGTSTLNQRLVPKIANRSKVNGQSGRMEFFWTILKSNDAINFESNGNFIAPENAYKIVKKGDSTIMKSELEYGNCNTKCQTPIGAINSSMPFHNIHPLTIGECPKYVKSNRLVLATGLRNSPQGERRRKKRGLFGAIAGFIEGGWQGMVDGWYGYHHSNEQGSGYAADKESTQKAIDGVTNKVNSIIDKMNTQFEAVGREFNNLERRIENLNKKMEDGFLDVWTYNAELLVLMENERTLDFHDSNVKNLYDKVRLQLRDNAKELGNGCFEFYHRCDNECMESVRNGTYDYPQYSEEARLKREEISGVKLESIGTYQILSIYSTVASSLALAIMVAGLFLWMCSNGSLQCRICI

SEQ ID NO: 187 - protein, 567 aa, Artificial Sequence
  NCBI influenza virus sequence
MEKIVLLLAIVSIVKSDQICIGYHANNSTEQVDTIMEKNVTVTHAQDILEKTHNGKLCNLDGVKPLILRDCSVAGWLLGNPMCDEFLNVPEWSYIVEKINPANDLCYPGNFNDYEELKHLLSRINHFEKIQIIPKNSWSDHEASGVSSACPYQGRSSFFRNVVWLTKKDNAYPTIKRSYNNTNQEDLLVLWGIHHPNDAAEQTRLYQNPTTYISVGTSTLNQRLVPKIATRSKVNGQSGRMEFFWTILKSNDAINFESNGNFIAPENAYKIVKKGDSTIMKSELEYGNCNTKCQTPIGAINSSMPFHNIHPLTIGECPKYVKSNRLVLATGLRNSPQGERRRKKRGLFGAIAGFIEGGWQGMVDGWYGYHHSNEQGSGYAADKESTQKAIDGVTNKVNSIIDKMNTQFEAVGREFNNLERRIENLNKKMEDGFLDVWTYNAELLVLMENERTLDFHDSNVKNLYDKVRLQLRDNAKELGNGCFEFYHRCDNECMESVRNGTYDYPQYSEEARLKREEISGVKLESIGTYQILSIYSTVASSLALAIMVAGLFLWMCSNGSLQCRICI

SEQ ID NO: 188 - protein, 557 aa, Artificial Sequence
  NCBI influenza virus sequence
VSLVKSDQICIGYHANNSTEQVDTIMEKNVTVTHAQDILEKTHNGKLCNLDGVKPLILRDCSVAGWLLGNPMCDEFLNVPEWSYIVEKINPANDLCYPGNFNDYEELKHLLSRINHFEKIQIIPKNSWSDHEASGVSSACPYQGRSSFFRNVVWLTKKDNAYPTIKRSYNNTNQEDLLVLWGIHHPNDATEQTRLYQNPTTYISVGTSTLNQRLVPKIATRSKVNGQSGRMEFFWTILKSNDAINFESNGNFIAPENAYKIVKKGDSTIMKSELEYGNCNTKCQTPIGAINSSMPFHNIHPLTIGECPKYVKSNRLVLATGLRNSPQGDRRRKKRGLFGAIAGFIEGGWQGMVDGWYGYHHSNEQGSGYAADKESTQKAIDGVTNKVNSIIDKMNTQFEAVGREFNNLERRIENLNKKMEDGFLDVWTYNAELLVLMENERTLDFHDSNVKNLYDKVRLQLRDNAKELGNGCFEFYHRCDNECMESVRNGTYDYPQYSEEARLKREEISGVKLESIGTYQILSIYSTVASSLALAIMVAGLFLWMCSNGSLQCRICI

SEQ ID NO: 189 - protein, 567 aa, Artificial Sequence
  NCBI influenza virus sequence
MEKIVLLLAIFSLVKSDQICIGYHANNSTEQVDTIMEKNVTVTHAQDILEKTHNGKLCNLDGVKPLILRDCSVAGWLLGNPMCDEFLNVPEWSYIVEKINPANDLCYPGNFNDYEELKHLLSRINHFEKIQIIPKNSWSDHEASGVSSACPYQGRSSFFRNVVWLTKKDNAYPTIKRSYNNTNQEDLLVLWGIHHPNDAAEQTRLYQNPTTYISVGTSTLNQRLVPKIATRSKVNGQSGRMEFFWTILKSNDAINFESNGNFIAPENAYKIVKKGDSTIMKSELEYGNCNTKCQTPIGAINSSMPFHNIHPLTIGECPKYVKSNRLVLATGLRNSPQGERRRKKRGLFGAIAGFIEGGWQGMVDGWYGYHHSNEQGSGYAADKESTQKAIDGVTNKVNSIIDKMNTQFEAVGREFNNLERRIENLNKKMEDGFLDVWTYNAELLVLMENERTLDFHDSNVKNLYDKVRLQLRDNAKELGNGCFEFYHRCDNECMESVRNGTYDYPQYSEEARLKREEISGVKLESIGTYQILSIYSTVASSLALAIMVAGLFLWMCSNGSLQCRICI

SEQ ID NO: 190 - protein, 567 aa, Artificial Sequence
  NCBI influenza virus sequence
MEKIVLLLAIVSIVKSDQICIGYHANNSTEQVDTIMEKNVTVTHAQDILEKTHNGKLCNLDGVKPLILRDCSVAGWLLGNPMCDEFLNVPEWSYIVEKINPTNDLCYPGNFNDYEELKHLLSRINHFEKIQIIPKNSWSDHEASGVSSACPYQGRSSFFRNVVWLTKKNNAYPTIKKSYNNTNQEDLLVLWGIHHPNDAAEQTRLYQNPTTYISVGTSTLNQRLVPKIATRSKVNGQSGRMEFFWTILKSNDAINFESNGNFIAPENAYKIVKKGDSTIMKSELEYGNCNTKCQTPIGAINSSMPFHNIHPLTIGECPKYVKSNRLVLATGLRNSPQGERRRKKRGLFGAIAGFIEGGWQGMVDGWYGYHHSNEQGSGYAADKESTQKAIDGVTNKVNSIIDKMNTQFEAVGREFNNLERRIENLNKKMEDGFLDVWTYNAELLVLMENERTLDFHDSNVKNLYDKVRLQLRDNAKELGNGCFEFYHRCDNECMESVRNGTYDYPQYSEEARLKREEISGVKLESIGTYQILSIYSTVASSLALAIMVAGLFLWMCSNGSLQCRICI

SEQ ID NO: 191 - protein, 567 aa, Artificial Sequence
  NCBI influenza virus sequence
MEKIVLLLAIVSLVKSDQICIGYHANNSTEQVDTIMEKNVTVTHAQDILEKTHNGKLCNLDGVKPLILRDCSVAGWLLGNPMCDEFLNVPEWSYIVEKINPANDLCYPGNFNDYEELKHLLSRINHFEKIQIIPKNSWSDHEASGVSSACPYQGRSSFFRNVVWLTKKDNAYPTIKRSYNNTNQEDLLVLWGIHHPNDATEQTRLYQNPTTYISVGTSTLNQRLVPKIATRSKVNGQSGRMEFFWTILKSNDAINFESNGNFIAPENAYKIVKKGDSTIMKSELEYGNCNTKCQTPIGAINSSMPFHNIHPLTIGECPKYVKSNRLVLATGLRNSPQGDRRRKKRGLFGAIAGFIEGGWQGMVDGWYGYHHSNEQGSGYAADKESTQKAIDGVTNKVNSIIDKMNTQFEAVGREFNNLERRIENLNKKMEDGFLDVWTYNAELLVLMENERTLDFHDSNVKNLYDKVRLQLRDNAKELGNGCFEFYHRCDNECMESVRNGTYDYPQYSEEARLKREEISGVKLESIGTYQILSIYSTVASSLALAIMVAGLFLWMCSNGSLQCRICI

SEQ ID NO: 192 - protein, 567 aa, Artificial Sequence
  NCBI influenza virus sequence
MEKIVLLLAIVSLVKSDQICIGYHANNSTEQVDTIMEKNVTVTHAQDILEKTHNGKLCNLDGVKPLILRDCSVAGWLLGNPMCDEFLNVPEWSYIVEKINPANDLCYPGNFNDYEELKHLLSRINHFEKIQIIPKNSWSDHGASGVSSACPYQGRSSFFRNVVWLTKKDNAYPTIKKSYNNTNQEDLLILWGIHHPNDAAEQTRLYQNPTTYISVGTSTLNQRLVPKIATRSKVNGQSGRMEFFWTILKPNDAINFESNGNFIAPENAYKIVKKGDSTIMKSELEYGNCNTKCQTPIGAINSSMPFHNIHPLTIGECPKYVKSNRLVLATGLRNSPQGERRRKKRGLFGAIAGFIEGGWQGMVDGWYGYHHSNEQGSGYAADKESTQKAIDGVTNKVNSIIDKMNTQFEAVGREFNNLERRIENLNKKMEDGFLDVWTYNAELLVLMENERTLDFHDSNVKNLYDKVRLQLRDNAKELGNGCFEFYHRCDNECMESVRNGTYDYPQYSEEARLKREEISGVKLESIGTYQILSIYSTVASSLALAIMVAGLFLWMCSNGSLQCRICI

SEQ ID NO: 193 - protein, 567 aa, Artificial Sequence
  NCBI influenza virus sequence
MEKIVLLLAIVSIVKSDQICIGYHANNSTEQVDTIMEKNVTVTHAQDILEKTHNGKLCNLDGVKPLILRDCSVAGWLLGNPMCDEFLNVPEWSYIVEKINPANDLCYPGNFNDYEELKHLLSRINHFEKIQIIPKNSWSDHEASGVSSACPYQGRSSFFRNVVWLTKKNNAYPTIKKSYNNTNQEDLLVLWGIHHPNDAVEQTRLYQNPTTYISVGTSTLNQRLVPKIATRSKVNGQSGRMEFFWTILKSNDAINFESNGNFIAPENAYKIVKKGDSTIMKSELEYGNCNTKCQTPIGAINSSMPFHNIHPLTIGECPKYVKSNRLVLATGLRNSPQGERRRKKRGLFGAIAGFIEGGWQGMVDGWYGYHHSNEQGSGYAADKESTQKAIDGVTNKVNSIIDKMNTQFEAVGREFNNLERRIENLNKKMEDGFLDVWTYNAELLVLMENERTLDFHDSNVKNLYDKVRLQLRDNAKELGNGCFEFYHRCDNECMESVRNGTYDYPQYSEEARLKREEISGVKLESIGTYQILSIYSTVASSLVLAIIVAGLFLWMCSNGSLQCRICI

SEQ ID NO: 194 - protein, 567 aa, Artificial Sequence
  NCBI influenza virus sequence
MEKIVLLLAIFSLVKSDQICIGYHANNSTEQVDTIMEKNVTVTHAQDILEKTHNGKLCNLDGVKPLILRDCSVAGWLLGNPMCDEFLNVPEWSYIVEKINPANDLCYPGNFNDYEELKHLLSRINHFEKIQIIPKNSWSDHEASGVSSACPYQGRSSFFRNVVWLTKKDNAYLTIKRSYNNTNQEDLLVLWGIHHPNDAAEQTRLYQNPTTYISVGTSTLNQRLVPKIATRSKVNGQSGRMEFFWTILKSNDAINFESNGNFIAPENAYKIVKKGDSTIMKSELEYGNCNTKCQTPIGAINSSMPFHNIHPLTIGECPKYVKSNRLVLATGLRNSPQGERRRKKRGLFGAIAGFIEGGWQGMVDGWYGYHHSNEQGSGYAADKESTQKAIDGVTNKVNSIIDKMNTQFEAVGREFNNLERRIENLNKKMEDGFLDVWTYNAELLVLMENERTLDFHDSNVKNLYDKVRLQLRDNAKELGNGCFEFYHRCDNECMESVRNGTYDYPQYSEEARLKREEISGVKLESIGTYQILSIYSTVASSLALAIMVAGLFLWMCSNGSLQCRICI

SEQ ID NO: 195 - protein, 558 aa, Artificial Sequence
  NCBI influenza virus sequence
IVSIVKSDQICIGYHANNSTEQVDTIMEKNVTVTHAQDILEKTHNGKLCNLDGVKPLILRDCSVAGWLLGNPMCDEFLNVPEWSYIVEKINPANDLCYPGNFNDYEELKHLLSRINHFEKIQIIPKDSWSDHEASGVSSACPYQGRSSFFRNVVWLTKRNNAYPTIKKSYNNTNQEDLLVLWGIHHPNDAAEQTRLYQNPTTYISVGTSTLNQRLVPKIATRSKVNGQSGRMEFFWTILKSNDAINFESNGNFIAPENAYKIVKKGDSTIMKSELEYGNCNTKCQTPIGAINSSMPFHNIHPLTIGECPKYVKSNRLVLATGLRNSPQGERRRKKRGLFGAIAGFIEGGWQGMVDGWYGYHHSNEQGSGYAADKESTQKAIDGVTNKVNSIIDKMNTQFEAVGREFNNLERRIENLNKKMEDGFLDVWTYNAELLVLMENERTLDFHDSNVKNLYDKVRLQLRDNAKELGNGCFEFYHRCDNECMESVRNGTYDYPQYSEEARLKREEISGVKLESIGTYQILSIYSTVASSLALAIMVAGLFLWMCSNGSLQCRICI

SEQ ID NO: 196 - protein, 567 aa, Artificial Sequence
  NCBI influenza virus sequence
MEKIVLLLAIVSIVKSDQICIGYHANNSTEQVDTIMEKNVTVTHAQDILEKTHNGKLCNLDGVKPLILRDCSVAGWLLGNPMCDEFLNVPEWSYIVEKINPANDLCYPGNFNDYEELKHLLSRINHFEKIQIIPKDSWSDHEASGVSSACPYQGRSSFFRNVVWLTKKNNAYPTIKKNYNNTNQEDLLVLWGIHHPNDAAEQTRLYQNPTTYISVGTSTLNQRLVPKIATRSKVNGQSGRMEFFWTILKSNDAINFESNGNFIAPENAYKIVKKGDSTIMKSELEYGNCNTKCQTPIGAINSSMPFHNIHPLTIGECPKYVKSNRLVLATGLRNSPQGERRRKKRGLFGAIAGFIEGGWQGMVDGWYGYHHSNEQGSGYAADKESTQKAIDGVTNKVNSIIDKMNTQFEAVGREFNNLERRIENLNKKMEDGFLDVWTYNAELLVLMENERTLDFHDSNVKNLYDKVRLQLRDNAKELGNGCFEFYHRCDNECMESVRNGTYDYPQYSEEARLKREEISGVKLESIGTYQILSIYSTVASSLALAIMVAGLFLWMCSNGSLQCRICI

SEQ ID NO: 197 - protein, 567 aa, Artificial Sequence
  NCBI influenza virus sequence
MEKIVLLLAIVSIVKSDQICIGYHANNSTEQVDTIMEKNVTVTHAQDILEKTHNGKLCNLDGVKPLILRDCSVAGWLLGNPMCDEFLNVPEWSYIVEKINPSNDLCYPGNFNDYEELKHLLSRINHFEKIQIIPKNSWSDHEASGVSSACPYQGRSSFFRNVVWLTKKNNAYPTIKKSYNNTNQEDLLVLWGIHHPNDEAEQTRLYQNPTTYISVGTSTLNQRLVPKIATRSKVNGQSGRMEFFWTILKSNDAINFESNGNFIVPENAYKIVKKGDSTIMKSELEYGSCNTKCQTPIGAINSSMPFHNIHPLTIGECPKYVKSNRLVLATGLRNSPQGERKRKKRGLFGAIAGFIEGGWQGMVDGWYGYHHSNEQGSGYAADKESTQKAIDGVTNKVNSIIDKMNTQFEAVGREFNNLERRIENLNKKMEDGFLDVWTYNAELLVLMENERTLDFHDSNVKNLYDKVRLQLRDNAKELGNGCFEFYHRCDNECMESVRNGTYDYPQYSEEARLKREEISGVKLESIGTYQILSIYSTVASSLALAIMVAGLFLWMCSNGSLQCRICI

SEQ ID NO: 198 - protein, 567 aa, Artificial Sequence
  NCBI influenza virus sequence
MEKIVLLLAIISIVKSDQICIGYHANNSTEQVDTIMEKNVTVTHAQDILEKTHNGKLCSLDGVKPLILRDCSVAGWLLGNPMCDEFLNVPEWSYIVEKINPANDLCYPGNFNDYEELKHLLSRINHFEKIQIIPKNSWSDHEASGVSSACPYQGRSSFFRNVVWLTKKNNAYPTIKKSYNNTNQEDLLVLWGIHHPNDAAEQTRLYQNPTTYISVGTSTLNQRLVPKIATRSKVNGQSGRMEFFWTILKSNDAINFESNGNFIAPENAYKIVKKGDSTIMKSELEYGNCNTKCQTPIGAINSSMPFHNIHPLTIGECPKYVKSNRLVLATGLRNSPQGERRRKKRGLFGAIAGFIEGGWQGMVDGWYGYHHSNEQGSGYAADKESTQKAIDGVTNKVNSIIDKMNTQFEAVGREFNNLERRIENLNKKMEDGFLDVWTYNAELLVLMENERTLDFHDSNVKNLYDKVRLQLRDNAKELGNGCFEFYHRCDNECMESVRNGTYDYPQYSEEARLKREEISGVKLESIGTYQILSIYSTVASSLALAIMVAGLFLWMCSNGSLQCRICI

SEQ ID NO: 199 - protein, 567 aa, Artificial Sequence
  NCBI influenza virus sequence
MEKIVLLLAIVSIVKSDQICIGYHANNSTEQVDTIMEKNVTVTHAQDILEKTHNGKLCNLDGVKPLILRDCSVAGWLLGNPMCDEFLNVPEWSYIVEKINPANDLCYPGNFNDYEELKHLLSRINHFEKIQIIPKNSWSDHEASGVSSACPYQGRSSFFRNVVWLTKKNNAYPTIKKSYNNTNQEDLLVLWGIHHPNDAAEQTRLYQNPTTYISVGTSTLNQRLVPKIATRSKVNGQSGRMEFFWTILKSNDAINFESNGNFIAPENAYKIVKKGDSTIMKSELEYGNCNTKCQTPIGAINSSMPFHNIHPLTIGECPKYVKSNRLVLATGLRNSPQGERRRKKRGLFGAIAGFIEGGWQGMVDGWYGYHHSNEQGSGYAADKESTQKAIDGVTNKVNSIIDKMNTQFEAVGREFNNLERRIENLNKKMEDGFLDVWTYNAELLVLMENERTLDFHDSNVKNLYDKVRLQLRDNAKELGNGCFEFYHRCDNECMESVRNGTYDYPQYSEEARLKREEISGVKLESIGTYQILSIYSTVASSLALAIMVAGLFLWMCSNGSLQCRICI

SEQ ID NO: 200 - protein, 567 aa, Artificial Sequence
  NCBI influenza virus sequence
MEKIVLLLAIVSIVKSDQICIGYHANNSTEQVDTIMEKNVTVTHAQDILEKTHNGKLCNLDGVKPLILRDCSVAGWLLGNPMCDEFLNVPEWSYIVEKINPANDLCYPGNFNDYEELKHLLSRINHFEKIQIISKNSWSDHEASGVSSACPYQGRSSFFRNVVWLTKKNNAYPTIKKSYNNTNQEDLLVLWGIHHPNDAAEQTRLYQNPTTYISVGTSTLNQRLVPKIATRSKVNGQSGRMEFFWTILKSNDAINFESNGNFIAPENAYKIVKKGDSTIMKSELEYGNCNTKCQTPIGAINSSMPFHNIHPLTIGECPKYVKSNRLVLATGLRNSPQGERRRKKRGLFGAIAGFIEGGWQGMVDGWYGYHHSNEQGSGYAADKESTQKAIDGVTNKVNSIIDKMNTQFEAVGREFNNLERRIENLNKKMEDGFLDVWTYNAELLVLMENERTLDFHDSNVKNLYDKVRLQLRDNAKELGNGCFEFYHRCDNECMESVRNGTYDYPQYSEEARLKREEISGVKLESIGTYQILSIYSTVVSSLALAIMVAGLFLWMCSNGSLQCRICI

SEQ ID NO: 201 - protein, 567 aa, Artificial Sequence
  NCBI influenza virus sequence
MEKIVLLLAIFSLVKSDQICIGYHANNSTEQVDTIMEKNVTVTHAQDILEKTHNGKLCNLDGVKPLILRNCSVAGWLLGNPMCDEFLNVPEWSYIVEKINPANDLCYPGNFNDYEELKHLLSRINHFEKIQIIPKNSWSDHEASGVSSACPYQGRSSFFRNVVWLTKKDNAYPTIKRSYNNTNQEDLLVLWGIHHPNDAAEQTRLYQNPTTYISVGTSTLNQRLVPKIATRSKVNGQSGRMEFFWTILKSNDAINFESNGNFIAPENAYKIVKKGDSTIMKSELEYGNCNTKCQTPIGAINSSMPFHNIHPLTIGECPKYVKSNRLVLATGLRNSPQGERRRKKRGLFGAIAGFIEGGWQGMVDGWYGYHHSNEQGSGYAADKESTQKAIDGVTNKVNSIIDKMNTQFEAVGREFNNLERRIENLNKKMEDGFLDVWTYNAELLVLMENERTLDFHDSNVKNLYDKVRLQLRDNAKELGNGCFEFYHRCDNECMESVRNGTYDYPQYSEEARLKREEISGVKLESIGTYQILSIYSTVASSLALAIMVAGLFLWMCSNGSLQCRICI

SEQ ID NO: 202 - protein, 567 aa, Artificial Sequence
  NCBI influenza virus sequence
MEKIVLLLAIVSIVKSDQICIGYHANNSTEQVDTIMEKNVTVTHAQDILEKTHNGKLCNLNGVKPLILRDCSVAGWLLGNPMCDEFLNVPEWSYIVEKINPANDLCYPGNFNDYEELKHLLSRINHFEKIQIIPKNSWSDHEASGVSSACPYQGRSSFFRNVVWLTKKNNAYPTIKKSYNNTNQEDLLVLWGIHHPNDAAEQTRLYQNPTTYISVGTSTLNQRLVPKIATRSKVNGQSGRMEFFWTILKSNDAINFESNGNFIAPENAYKIVKKGDSTIMKSELEYGNCNTKCQTPIGAINSSMPFHNIHPLTIGECPKYVKSNRLVLATGLRNSPQGERRRKKRGLFGAIAGFIEGGWQGMVDGWYGYHHSNEQGSGYAADKESTQKAIDGVTNKVNSIIDKMNTQFEAVGREFNNLERRIENLNKKMEDGFLDVWTYNAELLVLMENERTLDFHDSNVKNLYDKVRLQLRDNAKELGNGCFEFYHRCDNECMESVRNGTYDYPQYSEEARLKREEISGVKLESIGTYQILSIYSTVASSLALAIMVAGLFLWMCSNGSLQCRICI

SEQ ID NO: 203 - protein, 567 aa, Artificial Sequence
  NCBI influenza virus sequence
MEKIVLLLAIVSIVKSDQICIGYHANNSTEQVDTIMEKNVTVTHAQDILEKTHNGKLCNLDGVKPLILRDCSVAGWLLGNPMCDEFLNVPEWSYIVEKINPANDLCYPGNFNDYEELKHLLSRINHFEKIQIIPKNSWSDHEASGVSSACPYQGRSSFFRNVVWLTKKNNAYPTIKKSYNNTNQEDLLVLWGIHHPNDEAEQTRLYQNSTTYISVGTSTLNQRLVPKIATRSKVNGQSGRMEFFWTILKSNDAINFESNGNFIAPENAYKIVKKGDSTIMKSELEYGNCNTKCQTPIGAINSSMPFHNIHPLTIGECPKYVKSNRLVLATGLRNSPQGERRRKKRGLFGAIAGFIEGGWQGMVDGWYGYHHSNEQGSGYAADKESTQKAIDGVTNKVNSIIDKMNTQFEAVGREFNNLERRIENLNKKMEDGFLDVWTYNAELLVLMENERTLDFHDSNVKNLYDKVRLQLKDNAKELGNGCFEFYHRCDNECMESVRNGTYDYPQYSEEARLKREEISGVKLESIGTYQILSIYSTVTSSLALAIMVAGLFLWMCSNGSLQCRICI

SEQ ID NO: 204 - protein, 567 aa, Artificial Sequence
  NCBI influenza virus sequence
MEKIVLLLAIVSIVKSDQICIGYHANNSTEQVDTIMEKNVTVTHAQDILEKTHNGKLCNLDGVKPLILRDCSVAGWLLGNPMCDEFLNVPEWSYIVEKINPANDLCYPGNFNDYEELKHLLSRINHFEKIQIIPKNSWSDHEASGVSSACPYQGRSSFFRNVVWLTKKNDAYPTIKKSYNNTNQEDLLVIWGIHHPNDAAEQTRLYQNPTTYISVGTSTLNQRLVPKIATRSKVNGQSGRMEFFWTILKSNDAINFESNGNFIAPENAYKIVKKGDSTIMKSELEYSNCNTKCQTPIGAINSSMPFHNIHPLTIGECPKYVKSNRLVLATGLRNSPQGEKRRKKRGLFGAIAGFIEGGWQGMVDGWYGYHHSNEQGSGYAADKESTQKAIDGVTNKVNSIIDKMNTQFEAVGREFNNLERRIENLNKKMEDGFLDVWTYNAELLVLMENERTLDFHDSNVKNLYDKVRLQLRDNAKELGNGCFEFYHRCDNECMESVRNGTYDYPQYSEEARLKREEISGVKLESIGTYQILSIYSTVASSLVLAIMVAGLFLWMCSNGSLQCRICI

SEQ ID NO: 205 - protein, 568 aa, Artificial Sequence; identical to SEQ ID NO: 50
  NCBI influenza virus sequence

SEQ ID NO: 206 - protein, 568 aa, Artificial Sequence; identical to SEQ ID NO: 51
  NCBI influenza virus sequence
